United States Patent Application Publication US 2018/0363030 A1 - sequence listing, part 3

SEQ ID NO: 1 - DNA, 5419609 bp, Enterobacter aerogenes (residues 3,613,075-5,419,609 of 5,419,609)
  misc_feature: EA1509E
gctgaccccaaccgccctgctgctggccgccgcctgccggtgcgccgccgccctgacggccgcccagcatctgcatggtgccgccgacgtttaccacgatttcagtggtgtacttgtcctgaccggactgatcggtccatttacgggtgcgcagctggccttcgatataaacctgagaacctttacgcaggtattcgccagcgacttccgctagtttgccgaacaacacaacgcggtgccattcagtctgctctttcatttcgccggtttgcttatcgcgccaggattcggaagttgccagcgtgaagttggcgacagcgccgccacttggcatgtagcgtacttccgggtcctgccccagattaccgacgagaatcaccttgtttacgcctctgctggccatgatcgaatctcctgaataatacgttttgtataagtgtaaaccgggaattctaacaccacaaaggggcaatttgatagctgcgaagccaattccagaaaacatcccgccgctatgcaatttttcaccctcttactgcagcgcgattccaacactgtatatccagacaggttaagttgtgtcataattagccgtttctgccgtttgtccttcaaacaaaccaggcaatccgtgtatctacctaccgggaaaggtgaatggataagatcgaagttcggggcgcccgcacccataatctcaaaaacatcaacctcgtcatcccgcgcgacaaactcattgtcgtcaccgggctttctgggtctggcaaatcctcactcgctttcgacaccctgtacgccgaaggccagcgtcgctacgtcgaatcgctctccgcctatgcgcgacagttcctgtctctgatggagaaaccggacgtcgatcatatcgaagggctgtcgccggcgatttctatcgaacagaaatcgacctcccacaacccgcgttcgacggtaggcaccattactgaaatccacgactatctgcgactgctgtacgcccgcgtcggcgaaccgcgttgcccggaccacgacgtcccgctggccgcgcaaaccgtcagccagatggtcgataacgtgctctcacagccggaaggtcagcgcctgatgctgctggcgcccattattaaagagcgtaagggcgagcacaccaaaacgctggaaaaccttgccagccagggctacattcgtgcgcggatcgatggcgaagtctgcgatctttcggatccgccgaagttagagctgcaaaagaaacacacgatcgaagtggttatcgatcgcttcaaagtacgtgacgatctggcgcagcgtctggcggagtctttcgaaaccgcgctggagctctcaggcggcaccgccattgtttccaacatggatgacagtaaagcggaagaactgctgttctcggcgaacttcgcttgcccgatttgcggctatagcatgcgcgaactggagccgcgtctgttctccttcaacaacccggcaggggcctgcccgacctgcgacggccttggcgttcaacagtatttcgatcccgatcgggtgattcagaatccggagctatcgctggctggcggcgccatccgcggctgggatcgccgcaacttctactatttccagatgctgaagtcgctggcggatcactataagtttgatgtcgaagcgccctggggcaccctcagcgctaatgttcagaaagtcgtgctgtacggttcaggtaaagagaatattgaattcaaatacatgaacgaccgcggcgacacgtcagtacgccgccatccgttcgaaggcgtgctgcacaacatggagcgccgttataaagagacggaatccagcgcggtgcgcgaagagctggcgaaattcatcagcaaccgtccgtgcgccagctgcgagggtacgcgtctgcgccgcgaagcgcgtcacgtgtttgtggagaacacgccgctgccgaccatttccgatatgagcatcggccacgcgatggacttcttcaacaacctgaagctgtccggacagcgggcgcaaatcgccgagaaagtgctgaaagagattggcgatcgcctgaagtttctcgtcaacgtcggtctgaactacctgacgctctctcgttcggcggagacgctctccggcggtgaagcgcagcgtattcgtctggcgagccagattggcgcggggctggttggcgtgatgtacgtgctggatgagccctccatcggcctgcaccagcgtgataacgaacgcctgctcggtacgcttatccacctgcgtaatctgggcaacacggtcattgtcgttgaacatgacgaagacgccattcgcgccgccgaccacgtcatcgacatcggccccggcgctggggttcacggcggccaggtggtggccgaagggccgctggacgccattatggcggtaccagaatcgctcaccgggcagtacatgagcggtaaacgcaaaatcgaagtgccgaaacagcgcgtcgccgccgatccggaaaaagtgctgaaactgaccggcgcacggggcaacaacctcaaggatgtgacgctgacgttgcctgtcggcctgtttacctgcattaccggcgtttccggttccggtaaatcaacgctgattaacgataccctgttccccatcgcccagcgccagttgaacggcgcgacgattgccgagcctgcgccgtatcgcgatgttcaggggctggagcacttcgataaagtcattgatatcgaccagagcccgattggccgcacgccacgctcaaacccggcaacctataccggcgtcttcacgccggtgcgcgaactgttcgccggagtaccggaatcacgttcacgcggctatacgccgggccgcttcagttttaacgtccgcggcggccgctgcgaagcctgtcagggcgacggagtgatcaaggttgagatgcacttcctgccggatatctatgtgccgtgcgaccagtgcaaaggcaaacgctataaccgcgaaacgctggaaattaagtacaaaggcaaaactatccacgaagtgctggatatgaccatcgaagaagcgcgcgaattctttgatgccgtgccggcgctggcgcgtaagctgcaaaccctgatggatgttggtctgacctatattcgtctcggccagtcggcaaccacgctctccggcggtgaagcccagcgcgtgaagctggcgcgcgaactctccaagcgcggtaccggccagacgctgtatatccttgatgaaccgaccaccggtctgcatttcgccgatattcagcagctgctggacgtgctgcatcagctacgcgatcagggcaataccatcgtggtcattgagcacaacctcgacgtgattaaaaccgccgactggattgtcgacctcggcccggaaggcggtagcggcggtggggaaattctcgtttccggcacgccggaaaccgttgccgaatgtgaagcctcgcacacggcgcgcttcctgaagcccttgctgaagtaatctctcaggcctcttccttcacggaagaggcctcatttcatctcatttcatctcattttttcacgctgagacttcgtgatttgcccggagcgctcactctggcgtctgatagtcgctatcgcccaccgatgccgggaaaactatgcgagtaccacgcctcaatccgttacttatcatcgccgccgcgctatgtacgttaagcgcctgctcatgggttggccgctacagcgatacggcctatcagcaattgctcacactcaagcagttgcatttgcagttcatcgccaccgcagcgacgcaggacgatcaacaattgaacaaggaagatgaacagattcgccagcagttcacgcaggcgatcgcccaaggcgacgcgctgcgccaggaaaatttcaggatacttgaaggtaactatttacgcgtttacgcccatcgccagatgctgggcgcgccctttacccctgccgaagcgcaatatttaacgcggcagaccatttatctctatcaacaggctatcgctggcgaatgtcagcgtacagggagggaataatgccgacaaccatggagattcgcgcgctgttgtccgcttgcgcgattgatagcgccgaatggatgccattactgaatagagtacttggcgatgagcagcgcgaagtacgcgatagcgccatctttttgctacaggcattgcagcaaaaagctcagggctggctgaccgaagacgatctacggctactgctagaaggtcagcgcgatattgcccgcattcgcgccaacaaccagagcatcgcgcgccaggcgcagctgcaggcgacgttgttacggctgctcgatatcacgctgctggcgctggctggcaggctataagctaggccaactgcctccgcttatcctccgacagcaggtcgaccgcctgttgataggaagcatccaccaggtagtaaatctgcgagtctggcagagagccatcgaggaaaaccgtgctccagtgagctttattcagatgcctgctggggcgaacatcgcgatgttgttcgcgcagcagctcggcaagctccgggctggtctttaacgcaacggccggccgcttatcctccacctctttcaccatggcgaataacacatccgcgaccttgatttgcgtcgctttccagtcgctatgaacactttgctccgcgcccggcttcgccatgcagtactgcagtagatccgatatggtcattttttattctcccatgagcgttgcgacaatatgccgcgaaccgccgtgaatacgatgctcccccagccagatcccctgccaggtccctaacatgacgttgccgttctgcaccggcaacatcagggaaacgcccagcagcgatgatttaatgtgcgagggcatatcatcaggaccttcataatcgtgttcatacggcgcgttgtctggtacggcattgaggaaatgctgttccatatcaaaacggaccgtaggatcgcagttctcattcaacgtcagggaagcggaagtatgctggagtaacagatgcagcaggccaaccttgatatgcgagagctcgcggatttgaccaataatttcgttggtcaccagatggaaaccacgagatttcgggcctaatgtcagggtttgctgatgccacataaacgactcctgtaatgtgtgaatccttctaagtttgcagcaagaaacgaaaaggtaaaacctcaaaggctgaaattcgtacaaaaaaaagacagcctgcggctgccttctcgtattcagatgcgttgcgtttcacacgccttaatattctgaattcacaatcacctcttccccctgcgacccggccatcggcaaaggtttataggaggagtttgccgcacgcagcacgcgaattcctcgcgcatcggcatcgcgggccgccgagatatcgttgtcagagtcgccgtagaagactttgatattcttctcgcgtaaccactgagttttcgtgttctggccgggcttatcgccggcaaaaatcaccgggttcatgttagcaccggggatcaggaaatcatcctgcagggttttggagacggtctcagttttggtctggctgcggccggtgacgaagtagatgctgtcgccgcgcttaatatgcatcgcgatcagctggcggcccacttctttcggcatactgaactcgtcccagccgttattcatcttttcccagaactccgggttcttcagataggcttcgctgccgggagaataggttttttgcccgcgccagaaaccggggctggaaaataacacggtatcatcgatatcgaaacccaccgccatcggcgcgcggcccagcaggctattttcgatttgcgctaccgatacccaatggatcggcgcctgttcggcgagtttcgcaacattcgtcccttcccaaatgggctgtggagtggacgcgcgagcgacaacggagctattcagagcgaacaacagacaagtggcgctaatggccaaagttaacttacgcatatttatccctatgcccctcatgcgccaggccgcttagcggcaacctgagttattttgggtctaaataatcgattcgttattatttttaataatgagtgagcgcattaatgccccaagaccttaacgcctgaccacatagatagaaaggattttctgctcaaatgtcatataaaaagagcatgatcacacttcagaggtaatactaccctcgccttaacgctggcgagggcaaattagtaagtaagcacttacattacggcagcaaacgcctgggcgacacgctggacgttacgcgagttaagtcccgccacgcacatccggccgctggcaatcaggtaaacgccaaactcttcgcgtagacgatctacctgtgccgcgctcaatccggtgtagctaaacatgccgcgctgcttcagcaggtagtcaaagtttttgccgggaacggcctctttcagcgcatccaccagcgtctgacgcatcgccaggatgcgggtacgcatagcttccacttccgccagccatgaagctttcagcgccgggtcgttcaatactgccgccaccacctgcgcgccaaaattaggcgggctggagtagttacgacgcaccgtcgctttcaactgacccagcacgcggccagcggtttcagcatcatcgcagacgattgacaggccgccgacgcgttcgccgtacaacgagaagattttggagaatgagttgctgaccagcatcggcaggccggcgctggcaatcgcgcggatagcgtaggcatcgtcttccataccggcgccaaagccctgataggcgatatcgaggaaaggaattaagttacgtgctttcaacactttaacgacttcatcccactgagcgttgctcagatcggcgcccgttgggttgtggcaacatggatgcagcagcacgatatcgcgctcagggagcgtctgtagtttggcgaggaaggcttcaaaacgtacgccgttggtctcatcatcgaaccatgggtaagtacttacttcgaatccagccccttcaaatatggcgatgtggttttcccaggtcggatcgctaacccatacgcgagactgtgggaagtagcgtttaaggaaatcggcgccaaccttcagcgcgccggagccacccagggtttgaattgatgctacgcggttttgtttcagcaccggatggtcggcaccaaataacagcggcgcaatggcgtggcggtagctattgagaccttccatcggcagatacagcgaggcgccgtgcggctgggcattgagtcgtgcttcggcatccgccacggcctgtagttgcggaataatgccgtcttcgttgtagtaaagaccgatgctgaggttcactttgtcactacgcggatcttctttgaaacgctccatcaaggagagaatggggtcgccggcgtaggcgtcaactttttgaaacacgagatgtatctccaggtttacgaaagcaggtatttacacaataaaccggaagttggggaaggtcgaggggatgttggtaagttatcgacaaagatcgctgcaaacctgggcgacgccgcgcgccgcccctgctcattaccccgataagcgtagcgtaatcggggaaatatgccactgaccgtagttagtcgaggtaacggatagccagcctggaggtcaggcgagtgataagttcgtaagcactcactttcgttatttccgcgatgcgctcaacggggagcccttccccccataacacaaccggatcgccggcttgatcctgcgcctgagggccgaggtcgacgcaaatcatatccatcgccacgcggccgactatcggcacttcgcggccgttgaccagcaccggcgtgccggagggcgcggcgcgtggatagccatcgccatagcccatcgccacgacgccgaggcgggtatcgcgctcgctaatccaggtgccgccgtagcccaccggctccccggctttatgctcgcgcaccgcaatcaggctggaggtcagcgacatgaccggcaggcagccgaaatcctcaccggtagagtggttctccagcggcgaaacgccatagagaatgatgcccggccgcgcccagtcgaaatgcgactgcggccacagcaggatcccgcccgaggcggcaatagaacgcagccccggcttaccttcggtaaaggtggtgaaaatatccagctgacgctcggtcacgccgcattcaggctcatcggcgcgagcgaaatggctgacgatattcaccggctggcggacatttttgcaccggcttagccgctgataaaacgcttcggcctgttccggcagtacgccaaggcgatgcataccggtatccagcttcatccagacggtaaccggttcggccagttccgcttgttcgagcgccgccagctgttccgggctatgtaccacggtatgcaggtgctgcgcggaaatcagcgccagatccgccgcttcaaagaaaccttccagcagcaatatcggttgggtaatgcccccttcacgcaggcgcagcgcctcctccaggcgggcgacgccgaaggcatcggcgtcggtcagcgttcgcgcggtctcaagaaggccgtgtccgtaggcgttcgctttcaccaccgcaaccagtttgctggcaggagccagttcacgcaggcgttgcaggttgtgtcgcagagcgcggcggttgataactacagttgccgcttgcatttgaattccttaaaaaaagactgacagaggtttactcatcgtcatactgagggccggcataattatcgaaacgcgaccactggccgttaaaggtcagtcgtactgtaccgatcgggccgttacgttgtttaccaatgataatttcagcaataccttttaaatcgctgttctcgtgataaacctcatcacggtagatgaacatgattaagtcggcatcctgttcaatagagccggattcacgcaggtcggagttgaccgggcgtttatcggcgcgctgttccagagagcggttcagctgcgacagcgccaccaccggcacctgcaactcttttgccagcgccttcagcgagcgggagatttcggcgatctccagagtacggttgtcggagagcgacggtacgcgcatcagctgcaggtagtcgatcatgataaggccgataccgccgtgctcgcgggcgatacgtcgggcgcgcgaacgcacttccgtcggcgtcaggccggaggaatcatcaatataaatgttccgtttttccagcaagatacccatagtgccggagatacgcgcccagtcttcatcgtccagttggccggtacggatacgagtctgatcgacgcgcgatagcgaggccagagaacgcatcatgatctgctcggagggcatctccagactgaatatcaataccggtttatcctgcagcatcgccgcgttttccacgaggttcatcgcaaatgtcgtcttacccatcgaaggacgcgcggcgacgataatcagatccgaaggttgtagcccggcggtctttttgttgaggtcgtcatagccggtattcaccccggtgacgccatcgtgcggctgttggaacagctgctcaatacgggcgacggtggcatcgagcacatcggcgatgttcttcggcccttcatctttattggcgcggctttcggcaattttaaatacccgcgattccgccagatccagcaggtcctcgctggtgcgcccttgggggtcgaaaccggcttcggcgatttcgttggccaccgaaatcatttcacgcaccactgcgcgttcgcgcacgatgtcggcatacgcgctgatgttcgccgcgcttggcgtatttttggagagctcggccagataggcgaagccgccaacgctatccagttgcccctgacgctcaagcgattcggcgagggtgatcaggtcaatcgggctacctgactcttgcaggcgcgccatctcggtaaagatatgacgatgcggacgggtatagaaatcttccgacaccaccctttcggcgacgtcgtcccagcgctcgttatccagcattaaaccgcccaacaccgactgttccgcttcaatcgagtgcggcgggactttcaacccggcgagctgcggatcgcgttcgcgaggttctgtctgtggtttgttgaagggtttatttcctgccatagtgaatggagttacctgtaaatgagagacacaaaattataaaggagttcacatggcaacacgaattgaatttcccgcgcatggaggccccgaggtgctgcatgcggtcgagtttacccccaacgatcctgccgagcacgaaatccaggtagaaaataaagctatcggtatcaactacatcgacacctacatccgcagcggcctgtatccgccgccctcactgccgagcggtttgggcaccgaagccgccggtatcgtcagtaaaatcggcagcggcgttaaacatatcaaggttggcgatcgggtggtgtacgcccaggccgcgcttggcgcttatagctcggtgcataacgtgcatgccgacaaagcggcgattttacccaatgcgatttcctttgagcaggccgccgcctcgtttcttaaaggattgaccgtctggtatctgctgcgcaaaacctacgagattaaagccaacgagaccttcctgttccacgcggcggcgggcggcgtggggctgattgcctgccagtgggcgaaagcgctgggggcgaaacttatcggcaccgtcggcagcgagcaaaaagcgcagcgcgcccggcaggccggcgcctgggaaaccattaactaccgcgaagagaatattgccgagcgcgtcaaagcgctaaccggcggcaaaaaagtcgccgtggtttacgattccgtaggtaaagatacctgggaggcctcgctcgattgtcttcagcggcgtgggctgatggtcagcttcggcaattcatctggcccggtaaccggcgtgaatttgggtatcctcaatcagaaaggctcactctatgtgacccgcccttctctgcaaggttacatcaccaaccgggaagagctgacggaagccagcaacgagctattttcgctgatcgccagcggtgtgatcaaagtcgatgtagcggaaaatcagaaataccccctgcgtgacgccagacgagcacatgagattctggaaagccgggtgaccgagggatcgagcctgctgttaccgtaacgggatgagatcgccagaaaagtttagggcctcctgacggaggccctgactttttttgttcggctgtatgtagggtacagcgcgatgaattcgttatcgcgctaatagtgacagatttaatacgcaatgcctacgctgttttatgcaaaattactcaggttgtgacataccgctcaatacccaaaatgttggcttaatagcgccagcgatcttcacgacgatagcgggtggtcgtcggcgatttcatcgcccgaatgacccatacgacagccaccgccagcagcagccagggtagcagtttaaacattaatgcgaacaggccgccgaagaacatcaacgccgtggcgacaaccagcgcggcaataatgccaagcagcgagatgccggtgaccagcaacatgacaaaaaagccaataacaaataagagttccagcatggtcttctcccgaaaaaaataaccagatagctgattagctatttcaagagtcattttcaagaatcatgccaggtataactcattgaattaaaaaaaaacgccctgcagcaatagcgcagggcgtggcgaaaaagaccaggttttagcgaaaaaattaacgcttatcggcaaccagcttcagcgcgtgctccagcacgttgatatcggcgcccgctttgtgggcgttttcgctgagatagcggcgccactgacgcgcgccggggatcccctggaacaatcccagcatatggcgggtgatatgacccagataggtaccgttgctgagctcacgctcgatataggggtacattgcgcgcaccaccgccaccggatcggcatccgcgccgtcgacgccgaaaatctcacgatccaccgaagccagaatgcccggattttgataggcttcacgccccaccatcacgccatccatgtgctcaagctgctgtttggcctctgccagagatttaattccgccgttaatcgccatcgtcagatgcggaaaatcacgtttcagttgccagacgcgcggataatccagcggcgggatttcacggttctctttcgggctcaggccggaaagccaggctttacgggcgtgaatgatgaacatttcacactcccctttgccggagacggtctcaatgaaatcacacaggaattcatagctatcccgatcgtcaatgccaatacgggtttttaccgttaccgggatcgacaccacgtcgcgcatcgctttgatgcagtccgccaccagcgcggcattgcccatcagacaagcaccaaacatcccgttctgcacgcggtcagagggacagccgacgttgaggttaatctcgtcatagccgcgcgcttcggcaagctttgcgcattgcgccaatgccgcaggatcgctaccgcccaactgcagcgctaccggatgttcttcttcgctataggccagatagtcgcctttaccgtgaataatcgcgccggtggtgaccatttcggtatacagcagagtatggcgcgaaagcagacgcaggaagtagcggcaatgtctgtcggtccaatcgagcatgggcgcgatagaaaaacggtgggcggcaaaagcggtagacgtggattctggcatcatggcgaataaataagcatccgggtaaaaaggggcgctactatagcacaaacacaaaccacggcgcatagcgtcgaacgccacgcgccatggtcaaaatgttgcctatattttacgcggtttaccgtcgtgcgggccaaagaactgcggagggtgatccacccaacggtcctggcgagtcgcggcatagcccgggttcagcggatagtaaatacggttgtgctttttattcgcctcgccaacgaccagcagtcgcacctcctgctcggtattattcaggaaggtatgacatacgccagttcccgccggaaagccgacgctatcgcccggttccagcttccatagatagccattgatccagacttccggaaagccttccagcacgtagataaactcttcttcatcgctttccgcgtgcggataagaggttctgcgtcccggcggtaaacgttcatgatggatgcccagccgatttagccgtaggccgcgggcaagaggcgcgccaatagaaaaaagctcgtgactatcggggtaggtggaatcatccgcaccttccagttcgcgccaatgtcgaatgcaatcaggtcgtttcatcgttttctcccgaaaatgagatacatcaggtatagcaaagcttgcaggttctcggcgttttacctggttcgtgataaagtaacagtttcaacatcacgcaaccagaggatgctcatggataacaccacttcgcaagaaatgttagcgcaggctgaaaagctttgcgtgcaacgtggcgtacgcctgaccccgcagcgtctggaagtgttgcgtctgatgagcctgcagcaaggggcgattagcgcctacgatctgctggatctgctgcgtgaaaaagagccgcaggcgaagccgccgacggtctatcgcgcgctggagtttctgctggagcaaggttttgtgcacaaagtggaatcgaccaacagctatgtgctgtgccaccttttcgatcagccaacccacagttcggcgatgtttatctgcgatcgctgcggcgtggtcaaagaagagtgtgcggaaggcgtagaggatattatgcatacgctggcggccagaatgggcttcgctctacggcataatgtgattgaagcgcatggcctgtgcgcggcctgcgtggaagtcgaagcctgcagtactcgcgaacactgccatcacgatcataccatccagattaaaaagaaagcccgctgagtcgggcgacatcagcgggaagctacggcatatcactatgccgttagacaggcataaacagggggtcaaaaccgcgttcgctaccagcgcgtatcgttcttacgctcccagtcagacacctctttttcggcctgatctttggcatagccgtagcgttcctgaattttaccgaccaactggtcgcgcttcccttcgatgaccgtcatatcgtcatcggtcagcttaccccactgttccttggctttacctttcaactgtttccagttaccgctgatttcgtctttattcatcattacgtcctcatcattcggtgggttaacagcccgttttgttccggacatggtaataactatagatgacaatgctggtaccgattcgttattcggaatttttaaccatcaggtcgattgaaaacgctgggggattttcccggctcgcgctacgctgagccgggctttttacattcaggagggtgagttaaaccaggtgccacgctgccagtggcggcgccagatgagcgccagcgaaagcccacgcaaagccaggaacacggccagcgccagccacaggccgtgattgccgagcatgggcacagagagcaacgtcaccgcaaaccccgcagcggctaccgccatgctattacgcatctccgcgccgcgcgtcgcgccgataaacatgccatccagcagataacaccaaacgccaatcaccggtaggatcatctgccagaacagatagcggtcggccagctgctgcaatgatgggatagaggtcaatagcgcgatgatatgctcaccggccacgctgtagattaacgcaaacgccagcgctaccattcccgactgccgacaggccgcgcgccagacttccagcagttggctaccgtcacgcgcgccgtaggcttgcccggaatgagcttcgacggcataggcaaaaccgtccagcgcgtatgcggtaaaggtcagcatggtcatcagtaccgcattgaccgccaccacgtcgctgccaagacgggcgccgaagacggtgatggcgccaaagcagagctgcagcagcagcgagcgcagcatgatgtcgcggttaagcgccagcaggcgccgcatattgccgcgccacgcctccttcaacatggcaaacgtcacgccacgcagcgccagcacccgtttcgccatcagcaggccgatgataaaggtggcgtattccgacagcgccgtcgccagcgccgccccctgcacgttcatatgcagccccatcaccagccacagatcgagcacgatattcagcaagttgccgaccaccagcaggatgaccggggcgcgagcgtactgcacgccaagcagccaccctaacagcaccaggttggccaacgacgccggggcgctgagccagcggatttccaggaaccgcctggcctgttccagtaccgcctcgctcccgccgacgatatgcagcgcgaggtcaataagcggcatgcggaacagaacgatgagcagcccggcggccagcgccaggatcagcggttgcaccagcgcgcgcgccaggcgctgcggatctttggcgccataggcctgagcggttaagccagtggtgctcattcgcaggaacagcagcagcataaagaggaaactggtcgccgtcgcgccgacggcgacgccgccaagatagacggggctatcgagatgaccgacaacggcggtatcgaccagccctaacagcggaacggtgatattggagaaaatcattggtagcgcgaggcgccacagtgctttatcggcggcgttgagcagcatgaagagggaccagacagaggaggaacatcgcagcgtcatgtatcatgatgacgctgcgttaagacgggagttacagccactcaccgttacggatcacgccgacggccaaaccttcaatggtgaagctctgctggcgcagatcgacgacgatcggggaaaactcattgttttccggcagcagttcaacgacgttgccctgctttttcagacgcttaacagtcacttcttcatcgatacgcgcgacaaccacctgcccgttacgcacgtcctgagttttatgcaccgccagcagatcgccgtcgaggataccgatgtctttcatcgacatcccgcttacgcgcagcaggaagtcggcattcggtttaaacatcgccggatcaacctggtagtgaccttcaatatgctgctgcgccagcagcggctcgccggcggcaacgcggccaatcagcggcaggccatgttcttcttccgtcagcagacgaatgccgcgggaagcgccggagacgatttcaatcgcgcctttacgcgccagcgctttgaggtgttcttccgccgcgtttggggaacggaaccccaagcgctgagcaatttccgcacgcgtcggcggcatgcccgtttggctgatgtgatcccggatgagatcaaacacctcttgctgcctggtcgttaacgctttcattccgccccctgggtgtatatacagttatgctgtgagtatatacagctaatggtgattttggaaccacatatcatataaaaatcaggagattctttccgttttgcgagcgttgccgacaagacttagcggtaatgcgaccacagcagcatggcccaggtgatcagcgcgatgattatcgccagcagcaccgctgccgaccccatatccttggcgcgcccggaaagttcatggtgttcaggcccgatacgatcaaccaccgcttcaatcgcgctgttaagaatttcgactatcatcactaacaggaccgagccaataagcaggactcgcgtaatgacatcgacatccagccagcaggctatcgccacggccacaatagcggcgaccccttcctgacggaaagcggcttcattaacccatgccgcgcggaaacctttccaggaataacctgctgctttaatgattctggttaacccagtggtattattggccatcaaaaagaaccttttaatgtaaatgacgtcgctgagtgtacgtgtttgccgtgtgacaacggaaattttgtacgctttctgttattcttgccgcgcatttgcatgattaaccagaggcttcacatcgtttatgtccggctggcaacgaatttactataaattactgaatttaccattacgggtgctggtaaaaagcaagtctattccggcagaacctgctcaggaattagggctcgatacctcgcgtccgataatgtacgtcttgccttataactccaaggcggacctgctgaccctgcgtgcccagtgcctggcgcatgatttacccgacccttttgaaccgctggaaatcgacggcacactgctgccgcgctacgttttcatccacggcggcccgcgcgtgtttacttactacacgccgaaagaagagtccatcaagctgttccacgactacctggatctgcaccgtaaccatcccgacctcgacgtgcaaatggtaccggtgtcggtcatgttcggccgcgcgccgggtcgtgaaaaaggcgaagagaatccgccgctgcggatgcttaacggtattcagaaattcttcgccgtctcctggcttggccgcgatagcttcgtgcgtttctcgccgtcggtctctctgcgccgcatggcggatgagcacgggaccgataaaatcatcgcccagaagctggcccgcgtggcgcgtatgcacttcgcccgtcaacgtctggccgccgtcggcccgcgcctccctgcccgccaggatctcttcaacaagctgctggcgtcgaaagctatcgcccgcgcggtagaagatgaagcgcgcagcaagaagatatctcacgagaaggcccagcagaacgccattgcgctgatggaagagattgccgctaacttctcttatgaaatgatccgcctgactgaccgtattctgggctttacctggaaccgtctgtaccaggggattaacgtgcacaatgccgagcgcgtacgccagctggcgcatgacggccatgagattgtctatgtgccttgtcaccgtagtcacatggactacctgctgctctcctatgtgctctatcatcaggggctggtgccgccgcatatcgccgccggcattaacctcaacttctggccggccgggccgattttccgccgcctgggcgctttctttattcgccgcacctttaagggcaacaagctctactccacggtatttcgcgaatatcttggcgagctgttcagccgtggttattcggtggaatactttgtcgaaggcgggcgttcccgtaccggccgtctgctggatccgaaaaccggcaccctgtcgatgactatccaggcgatgctgcgcggcggtagccgccccatcacgctggtgccgatttatatcggctacgagcacgtaatggaagtgggtacctacgccaaagagctgcgcggcgcgacaaaagaaaaagagagcctgccgcagatgatgcgcggcctcagtaagctgcgtaatcttggccagggctacgttaacttcggtgaaccgctgccgctgatgacctatctcaatcagcacgtgccggaatggcgcgaagccatcgatcctatcgaagccgtccgcccttcctggctgacgccgacggtgaataatatcgccgccgacctgatggtgcgcatcaacaatgccggggcagctaacgccatgaacctgtgctgtacggcgcttctggcgtcacgtcagcgttctttgacccgtgagcagctaacccaacagttggattgctacctcgacctgctgcgtaacgtgccgtactccaccgattcgaccgcgccgacggcttccgccagcgagcttatcgaccacgcgctgcagatgaacaagttcgaagtcgagaaagacaccatcggcgatatcatcatcctgccgcgcgagcaggcggtgctgatgacctactatcgcaacaacatcgcccatatgctggtgatgccatcgctgctggccgctatcgtgacccagcatcgccgcatctcccgtagcgaagtgctgcgtcatgtcgagatgttctatccgttcctgaaagccgaactgttcctgcgctgggaaaaagaagaactggcgggcgttatcgatgcgctgatggcagagatgcagcgtcaggggctggtggtgctgaatggcgatgagatgagcgtcaatccggcgcactctcgttccctgcagctgctggccgccggcgcgcgagagacgttacagcgctatgcgatcaccttctggctgctgagcgccaacccgtccatcaaccgcagtacgcttgagaaagaaagccgcaccatggcgcagcgtctgtcggtactgcacggtatcaacgcgccggagttcttcgataaggcggtgttcagtactctggtgctgaccctgcgtgacgaaggctacatcagcgataccggcgatgccgagccggcagagaccctgaaggtctaccagatgctggcggatttgattacgtcggatgtacgtttgacgattgaaagcgccgctcaggacgacgcataacgttgcggcttctgttccccggctcgcggtgcgagtcggggaacagaaggatttactgcaggtaactcatcgccagaccgagaaacagcaccagcccaacgtagttattattcataaacgctttgaagcagttatcgcgttcgcgcttgaagataagtttctgctgccagacaaacagtcctgccgcgataaacagcgaccagtaaaacgcccagttcagcccattcagccagcctacagcccccatcaataccagcacggcaacctgcagaataccgataatcaaacgatcgttttcgccgaacagaatcgccgtcgacttaatgccgattttgacatcatcgtcgcgatcgaccatcgcgtactgggtgtcgtaggctaccgcccacagaatattggcgaggaacatcagccagcagctgagcggcagcgcttcacttaccgccgagaacgccatcgggatcgaccaaccaaaggccgcgcccagcaccacctgcggcagatgggtgtagcgcttcataaaggggtagacccaggccagcgccagcgccgcgaccgacagcaggatggtcatggtattgagcgtcagcaccaacaggaaggagagccccaccagcaccgcgaataatatgcgcgcttctttttccgtgacctcgccgcttggtaacggccggcgagccgtacgcttaacgtgaccatcaaatttacggtcggcatagtcattcacgacgcagccggcggcgcgcatcaaccagacgccagcgacaaataccgccagaatccacagcggcggtaccccgggtgaagccacccataacgcccacagcgtcggccacagcagcaatagcgcgccgattggtttgtcagtacgcatcaggcggtgaaacgccaacagcttattctgcgtcagactccactccattttctcttcctcttaatacaatggcgatgcaggcagaaaaagctctgtcagcagcagcggtttgccgctcagccggagacgggaacgtcgcccccacagctgtgcactacggccaatctcaataaaatcacgggttaacgtcgacgacgtaaacagataccggcccagcggcgtctgccccaactgctgcagggctaattccgggccgcatagcgtcgattccggcacgagagtacgaccggcaagccagggttcgccatcggcgcaaagaatgatctcccgcagccaataccgcgcatcttccggcagcagggcttcttcgcccgccagcgcgtcgcgcccgacgaaaccttcgttaatcatggtcacggtgacctttttcccttgttgctcaaagcgtttggtcattgagtcttccagcaacagccagtcgcgcagcggcgcgtccagctcgggtatggcggcaaaatagcgcagcgcacgcagttgcgtaagcgcaggatgtggcatgcctgattctccggtacaaaacgtgcaggcattgtatcgcagaatagcgttttgagggcgggcaaacgtcaatatacgatcatccgcgcaacaggcatgcaacagttgccgctgcgcgagaaaaaaaagtgcgtccaggcggacgcacctaaaggctgtgcctaaacatcagcattgtggggagacggtcaccccttgccttttacactgctgataaaggtggaacgagcagatttcgagccgaggcgttcagcttcgttcatcaatttcagggctttgtcgatatcaccttgcttcaccgcctgcttaataccgttgttgaagtaggtttcggtatcgtcaagcatcggttcgcttttggctgctggggctggcgcggctaccggcgcagcggccggggcgttatagaccggcgccgcggtattgccgacggtcaccgggcctgggccggaggagccgaacagcgggcccaccagcacgctggaactcgaagacgttttcaccttcaggctcaaggtgccgtcagtggtatgtttggcgatcggatccggaatgtccggcaccgcgttaccggtgcctttcgcgtaggctttcgccgggtcgattaatttggtggtctgctgcagatcctgcggagtggtaaacaccagcacataaattttctgctgtcccagcgccggcgtcaggcgcattaccccttccaggcggtcggcgctcatcacgcccggctccagataagtgaaatagctgctcgggaagaaggcggacggcgtcatgctctgatcgaggatcaggacatttggcgcgtagacgctagtctgtttgtcgacttcactggtcagcgtcagggttaactcgccgatattggccggtacgctataggccaccaccggcccggcgataccggggacattcagcgtttgaccggcgatcgccactttagaggtttgggttttcgattgatcgaccggcgtccaggtcaactgctgcagcgaggaagccgggattgacggcgcggcagaggtattctgcggcacgaaattgacatcagcaaaactgactgcgggtacgctggccagcaggccggcggacaggcagagggcaacgagacttttcttcatattcattgttatcacctcaattcctatggccgagcgttagccaggcaatagcgcgctgggccgaaaacagaggggctgatgcccctcttttactcatcatgatgcggatagcattaccaccagatttccatctgggcgccgaaggtccactcatcgttgtcgccgcggctggaagtgttgatgccggtaccagaggtatcgcgcatggcaacaccgctatcggtgtaaccccacttctcatcccacttcgcgtaggtggcgaacagacgaattgccggacgggaccagatgctgtcgcccgcctgccactgttgcgccagggtgattttgtactggttgttgctgtcgccggttttctgcgatttgacgttgtcgtagccgacttccagcagggtgctcatgatcggcgtccatttgtacataggacgtacgccgacggtccaccatttggtaccgttgttgttgtccaggttgacgtcctggtacatggcgacgtacatcatgtcccaatcgtccgccagagagaccgcgccgtggtcaagcacacgccacatggaaccatcgttattaatgctgccgccctgcggtacgcctttgccgttggaggtcatggcgtcggtcgcgtactgcagaacaaatttgttgtagcctttcaggatgctctgggtatgttcagcggtgaacatccagccatcttttgatgcatccggctgcaggtagtagtcatccggcacgttggtgtgaccatagtccacgcccagctccagcgtaccgcctgggttggtttccatctgcgctaaacgcacatcgaagacgtcgttcggtaccagatgatcataaacgcgttcgccagtcagcggatcgcggtcagcataggttgccgagccgccggattcagaagaacgagtggcggccagagagagtttaccgaagcccagatcgatgttttcgataccggcgccaggaccggatatatcccagtagtagaagtcgatcatgtgaacgtcatgacgctgatagaagcgcttaccggcccacagggttgaacccggcagccagtcgatcaggtttttaccctgcacgttaacttcacggaaggccgggctggtagattcccagtcgttctgctgcgataccgagtaggcaacgttggtatcgaagtagaagctcttatcgccctctttccacacttcctggcccagtttcagttcagcgtaagtttcacattcgttaccgagacggtatttactttgagcgccagtggcctggaagcactgctgttcgccgccgctgccggtccagccaataccggaacgcgcgtagccgtggaaatcgacagccagcgcctgggcagacatcacgcccgccgcaacggctaccgccagtggaagtttgcgcagagtaatcatcattctatctcctgagatcattgcttttctttgaacacttccccgtcggccgccgcatggttggctgcgcgctgggttcgcgtcttcttttaatggggaaccttatacgcctggctctttatgcaaccgacgacaagcggtgccatcctcacggaataaatggcagcgctccggcggcaaaccgatggcgaatgtggctccctcttctaccaacaccacgtcattctggcggtacaccaggttctgacggatggcggggatctggatatgaatttgcgtttcgtgaccaagctgttcgaccacctgcacttcgccctcaagggtgacatcggcgatgtcgctcggcagcaggtgttccgggcggatacccaaagacatattggcgccgacctgaacgtgggcgctgtctaccggcagccagacctgctggcggttcggtagttcgacctgtacctgttcaatggcggtcgcggtgactttgaccggcaggaagttcatcttcggcgagccaataaagcccgcgacgaagcggtctgccggatagtgatagagttccagcggtttcccgacctgcgcgacgcggccggcatccagcacgacgattttgtcggccagggtcatggcttccacctgatcgtgggtgacgtaaatcatcgtgcgaccaaggcgcttatgcagacgggagatttcgatacgcatctgcacgcgcagcgcggcatcgaggttggacaggggctcatcaagcagaaaaacccgcggctcggcgaccagggtacggccgatggccacgcgctgacgctggccgccggagagcgctttcggcttacgctccagcaggtgcgccagctgcaacacctctgcgacctgagtcacgcgctggttaatcacctcttttttcgccccggccagtttcaggccaaaagacatattttcggcaacggaaaggtggggatagagcgcataagactggaataccatgccgatgccgcgctcggcgggcggcacatcgttcattcgggtatcgccaataaacagatcgccgctggtgaccgtttccagtccggcaatcatacgcagcagggtggatttgccgcagcccgacggtcctacaaacacgacgaactccccatcctggatctcgagattgatatctttagataccaccacgtcgccccaggctttcgttacatttcgtagctgtacgctcgccatgcccttctcccttcgttacaacctgtcacttaaagacacattcaagatgggctgactatgcggcattcattacgttggcaaatcctccaccccccgggtttttgatgggggaggagacgggaggatgagaaattgcctctcgccgccggaagttcccggcaaaaggtcatttcgtgatcgaagcgacaaaaacggtggcttttttatgtgctccagggcccattaccggcatttctgcaatacggatcacataaacggcgggcggggcgtagacatagggaggatggaaagaggttgttaaaaaaggaaactcatcagcgttaaaccactcaagtgtatccacgagcacatcaccaaataggacgggtatatgaaaatcaaaactggcgctcgcatcctcgcgctgtctgcattgacgacgatgatgttttccgcctctgccctcgcaaaaattgaagaaggtaagctggttatctggattaacggcgataaaggctataacggcctcgctgaagtgggtaaaaagttcgagaaagataccggcattaaagtttccgtagaacatccggataagctggaagagaagttcccgcaggttgcagcgaccggcgacggcccggatatcatcttctgggcgcatgaccgctttggcggctacgcgcagtccggtctgctggcggaaatcaccccggataaagcgttccaggacaaactctatccgttcacctgggatgccgtacgttacaacggcaagctgatcgcttacccggtagcggtggaagccttgtcgctgatttataacaaagacctggtcccgaacccgccgaaaacctgggaagagatcccggcgctggataaagcgctgaaggcgaaaggcaagagcgcgctgatgttcaacctgcaagaaccgtacttcacctggccactgatcgccgccgatggtggatacgcgtttaagtttgaaaacggcaaatacgacgtgaaaaacgtcggcgtcgatagcgccggggcaaaagccggtctgaccttcctggtcgacctcatcaaaaataaacacatgaacgccgacaccgactactccatcgcggaagcggcgttcaacaaaggcgaaaccgcgatgaccatcaacggtccgtgggcgtggtctaacatcgacaagagcaaggttaactacggcgtcactctgctgccgaccttcaaaggcaaaccgtctaaaccgttcgttggcgtactgagcgccgggattaacgccgccagtccgaataaagaactggcgaaagagttcctcgaaaactacctgatgaccgatccgggcctggaagcggtgaacaacgataaacctctgggcgccgtggcgctgaaatccttccaggagaagctggagaaagacccgcgtatagccgccaccatggctaacgcccagaaaggcgaaatcatgccgaacatcccgcagatgtcggcgttctggtatgccgtccgtaccgcggttatcaacgccgcaagcggccgtcagaccgtcgatgccgcgctgaaggatgcacagggccgtatcaccaagtaataccgtcgcacacgtgccggatggcggcataaatgccttatccggcctacacgctttgtaggccggataagcacagcgccatcaggcactcttgtcgacagatatttaacgttgtagaggatgatccccatggatgccgttaaaaagaaacactggtggcaaagcccgcaactcacatggtctgtgattggtttgctgtgcctgctggtgggttaccttgttgttttaatgtacgcccagggggagtacctgttcgccatcatgacgctgattttaagctcagttggcctgtatatcttttccaatcgcaaggcctatgcctggcgttacgtttatccgggtctcgccgggatggggctgtttgttctgttcccgctgatctgcaccattgccatcgccttcaccaactacagcagcaccaaccagctcaccttcgaacgcgcccaacaggtactgatggatcgttctttccaggccggcaaagcctataacttctcactctacccggcaggcgatgagtggcagctggcgctgacggacggtgaaagcggtaaaaattatctctctgaagcctttaaatttggcggcgagcagaagctggcgttaaaagaagccgatgccctgccgcaaggcgaacgcgcgaatttacgcgtgatcacccaaaaccgcgccgcgctgaaccaactgaccgccgtgctgccggatgaaagcaaagtgattatgagttcgctgcgccagttctccggcacccagccgctgtacgcgctggctaacgacggcacgctcaccaacaaccaaagcggcgtgaaatatcgccccaacgccgacatcggcttttatcaatccatcaatgccgacggcagctggggcaatgagaagctgagcccgggttataccgtcaccatcggctgggataacttcacccgcgttttccaggatgaagggatccagaagccgttcttcgccattttcgtctggaccgtggtgttctcggtgctgacggtgattttgaccgtcgccgtgggaatggtgctggcctgcctggtgcagtgggaagcgttgaagggcaaagcgatttaccgtgtgctgttgattctgccgtatgcggtgccgtcatttatctcaatactgattttcaaggggctgtttaaccagagctttggtgaaatcaacatgatgctgagcgcgctgttcggcattaaaccggcctggtttagtgacccaaccaccgcgcgcacgatgatcatcatcgtcaacacctggctgggctacccgtacatgatgatcctgtgcatgggactgctgaaggcgattccggacgatctgtacgaggcgtcggcgatggatggcgcgggcccgttccagaacttctttaaaattacgctaccgctgctgatcaagccgctcacgccgctgatgatcgccagcttcgcctttaactttaacaacttcgtgctgattcaactgttaaccaacggtggcccggaccgtctcggcaccaccacgccggccggttataccgacctgctggtgagctacacctatcgcatcgcctttgaaggcggcggcggtcaggacttcggcctggcggcggctatcgccacgcttatcttcctgctggttggggcgttagcgattgtgaatctgaaagccacgcgcatgaagtttgattaagggagataacgataatggctatggtccaacccaaatctcagaaactgcgtctctttacgacacacctgttgctgctgatttttatcgccgcgattatgttcccgctgctgatggttatcgctatctcgctgcgcgaaggcaacttcgcgaccggcagcctgatcccggataccatctcctgggagcactggcgtctggcattaggcttcagcgtcgaacacgccgatggccgggtaacgccgccgccattcccggtcctgctgtggctgtggaactcaattaaggtggccgggattactgcgatcggcatcgtcgccctctccaccacctgcgcttacgctttcgcccgtatgcgcttcccgggtaaagcgacgctgctcaaagggatgctgattttccagatgttcccggcggtactgtcgttggtggcgctgtatgcgttgttcgaccgcctcggtcagtatctgcctttcgtcggcctcaacactcacggcggggtgatcttcgcctatatgggcggcatcgcgctgcacgtctggacgattaagggctacttcgaaactatcgatggttcactggaagaagcggccgcgctggacggcgccactccgtggcaggccttccgcctggtgctgctgccgctgtcggtgccgattctggcggtcgtgtttattctgtcgttcatcgccgcgattaccgaagtgccggtggcctcgttgctgctacgcgatgtgaacagctataccctggcggtggggatgcagcagtatctcaatccgcagaactacctgtggggcgacttcgccgcggcggcggtactgtcggcgattccgattaccgtcgtcttcctgcttgctcagcgttggttggttaacggcctgacggcgggcggggtgaaaggttaagtttcatcatgttagacccttgttttatcgccccaaatttcagagagggtgggatgtggtacacgaccccaaccgggtacggcagcccacctctccctgaaaaagtagggcaaatgccactgcaatcctctactggaccctacataaatttcatttgtgattgtcggtcaagcggccctggaggccgctttttttattcccgtttcagacggttggaattacacaaccacagggtaatcaccaggataaggatcgccgcagagtaaatcagcaccgccatcggcgactcatggtcgacgataataagccgcacaatcgcggtaataccgatatagacgaaataacgcagcgggaagtgaaaaccggactcaaagtatttcacaatcagcgcgataaactcgaagtagagaaaatagaccaccagcccttcaaccagcttgtacttactcaccggctccggcgtaaacagcacgtgcgccagatgcagggtctcctttcccaggaacaccaccagaatgattcccagacacagcagcgccaggttgagcacggcctgcatggccttcgcaacaaaattaaccagcggacgatataccgacggcatagtgacacctcgaatgcatgaacgttattgatctgtatagcgcaaaagtgtgatccagatctacttcgctttgcgagcagcatcggtccttcaatgcgctaaatgcaactaagagaaaattttacttcctacaatgctgtgagcaagttaaccaaatcatccgttacgcttaggataaaaccaaataaccaactgaaatttaaaacatttactatttgaaacagttatatcttaaaacctgccacaagataaaatttttctctaatccgcattgtttatatggctattagggtaagatttttcttatcctttgtcttagcattatcgcagttgaataaaatttaattttggacattaaatcattatgaacaccgataacgcttccctgtacgtaaaatggctcaaacaagaagttgccccggctttaggttgtactgaacccgtcgctatttccttcactgccgcctacgccgcacaatatctggatcagccttgcactaaaattagcggctttatttccgccaatctctataagaacgcgatgggcgtcactattcccggcaccaccgtttgcggtgtagcgctggccgccgcaattggcgcatttggcggcaacccgcaaaagggattaaaaacgctggaagatatcaccccgctacacgtcgaaatggcgcaacaactgatcgccaataatgccgttgatattgccgtcaaagagaccccggactttattcatctcgatttaactctctctgctggcgagaatatctgtcgcgtcgtggtgaaaggaacccacaccaacgtggtcgaactttatattaatggccagccacagccattaagtgcaaaacagaatgcgagcgcccggcacgaaacgctgcccacattttcgctacagcaggcttacgaatttattaatagcgccgactttaatgatattcgctttattctcgaggccgcgcgcttaaactccgcgctggcggcagaaggcaaaaccaaaaaatatggcctgaacattaacggtacctttgctgacgccgtgaaaaacggcctgatgagcaacgatctgttaagcaaggtgatcatcaacaccgtcgccgcttcagatgcccgcatgggcggcgcgccggtggtagcgatgtctaactttggttcgggcaatcagggcattacggcaaccatgccggtagtggtggttgcagagcatctcggtgccgatgaagagaccctggcgcgcgctttgtctctatctcatctcaccgccatctcaattcattctcgttatacgcgcttatctgcgctatgcgcggcctcaaccgccgccatgggcgccgccgccgggatggcctggctatttactcgtgacatcaacaccattaacaccgcgattattaatatggtcagcgatattaccggcatgatttgtgatggcgcctctaatagctgtgcgatgaaagtctcatctgtggtatccagcgcctttaaggcggtactgatggcaatgcaaaatagctgcgctggcgccaatgacggtattgtctgcgccgatgtcgagcagactattaataacctgtgtcgcctggtgattaaaccaatggccctcaccgataaagaaatcatcagcatcatggtcgctaaataataatatttaacgggcctgaacattcaggccctgattcacctaccctacccacactattatttataaattagcaggtatagcagatgaataaaaaagtcatcttccgcggcgccagcgccattatgccgctgtgcatcggcgactttccattttcatttattgtcggcgcattaagcgtcagcgccggcatgagcgtctggcagagtacggcgtggtcggcgattgttattgccggctccgcgcaaatgctggcattaaatatgcttaaaaccggcgccacgctcggggttattatattcaccacattaataattaacctacgtcacgtactgtacagcgcctctatttccggtaccgtccgtgaagcatcattctttaaaaaatgctttatgtcctacgcgctgaccgatgaagtgtacgccaccaccgtcaaagagatggaaggcaataagcaggataagtatctgttttatggctcggcgatgatcaccttctgggcgatttgggtactggccgatttcctcggcgcgctggtcggcgcctcattcccgaatattgaaaagtatggtctggatttcgctatggtcgccgcctttatcgccattgtggtgccgcaaattaaaagccaggcctgtaccgtcgccgccgtggtggccgccgtctccggcgtgctgttggtcatcctgccctactccctgggtattgtcgtcgcctcagtgcttggcgtgctcgccgggctgtgcgtcgacctggctgaagaacgtaaacaggcagcgattgccgaatccgacatgccgctcgtggaggcgctggaacatgaataatagctactttatcgccctgactttgggtatggccgccgtgaccttcctgatccgattttcgtttatcggcctggccggaaaaatccagatgtccgagcgggtgacgaaaacgctgcgattcgtcccggtcaccgtcctgccggccattatcaccattcagatccttagcgtgaattccagcatggagttcgacttaaagaatccgaaggtgatcgccgccattatctgcacgctcgccagcttccgtttaggcctggtgtgggtggtggtgagcggcgtcggctcgctggtgttgttgaattactttatgtaaccgtttgaaggataacccgtatgattattaccaccgctgacgcgcctgccgctatcggcccgtacgtgcagggcgtcaatctcggcgcgatgaccatcacctccggtcagctgccgattaatccgctggacggcaccatgcccagcgatatcgccgaacaggcgcggcaatcgctggaaaatgtgaaagccatcgttgaagctgctggactcacggtcgggcagattgttaaaaccacggtgtttgtcaaagacctgaaggattttgccgccatcaacgccgcctatgaggccttctttaccgaacatcaggccacctttccggcacgctcctgcgtggaggtcgcaagactgccgaaagacgccggcgtcgaaatcgaagccatcgccttcgctcgttaatctcctggctggggggaaaacctccagcctccttccccaccgtttttcgccgttcctccttgctcattttgcaggcactatacgatgagatccgaacgaggaatgcagcatgtcgaatgagccaaatattcccccttttacgcttcgtgataccggcgttcgcaacgtcatttgcggcgaaaacgtggtcatataccagcccgccaacctttatgattgccagcttgacgataacgtctttgtcgggccgttcgtcgagattcaggggcacacgcgtatcggtgcggacagcaaaatccagtcccacagttttatctgcgagtacgtcaccatcggccaacgctgttttatcggccacggcgtgatgttcgctaatgatatgttccgcgatggcaaaccgaatgccgaccgcgacagttgggggcgcattgaaatcggcaatgacgtgtctatcggcagcggcgccaccattctggcggtgagtatctgcgatggcgtggtcatcggcgccgggagcgtggtgacaaaatccatcaccgagaaaggcgtttgggcgggcaacccggcgaggctgctgcggcgactataaataaaaatgccgacccgagggtcggcattaaggtttaattgcgcagcgcttatgcgcgccaggctttataacggttaatcaggccgttggtagagctgtcgtggctgctgacgtccgcgccatctttcagttccggcaggatacggttagccagctgtttacccagctcaacgccccactgatcgaaggtgaagatgttgaggatcgcgccctgggtgaagattttgtgctcatacagcgcaatcaatgcgcccaggctgaacggggtaatttcacgcagcaggatggagttggtcggacggttgccttcgaacactttgaacggcaccacgtgctcaagctgagccggatctttaccctgatcgcgatattcctgctcaaccacttcgcgggatttaccaaaggccagcgcttcggtctgagcgaagaagttagacagcagtttctgatggtggtcagacagcgggttatgggtgatagccggggcgatgaaatcgcacggtaccattttggtgccctggtggatcagctgatagaacgcgtgctgaccgttagtccccggctcgccccagatgatagggccagtctggtaatccacgacgttgccgttacggtcaacgtacttaccgttggattccatgttgccctgctggaagtaagcggcaaagcgatgcatgtactgatcgtacggcagaattgcttcggtttcggcgccgaagaaattgttgtaccagataccaatcagcgccagcagtaccggcaggtttttctcagccggcgtggtagagaagtgtttgtccatggcgtgggcgccggacagcagctgaacgaagttgtcgaagccgacggacagaatgatagacagaccgatggcggaccacagggagtaacgaccgccgacccagtcccagaactcaaacatgttagccgtatcgataccgaactcgccaaccgctttaccgttggtggagagcgccgcgaagtgtttcgccacgtgtttctcgtcgcccgcggtcgccaggaaccagtcacgcgcgctgtgggcgttggtcatggtttcctgagtggtgaaggttttagaagccaccaggaacagcgtggtttccggattcaccgctttcagcacttcggcgatatgggtgccgtcaacgttagaaacgaagtgcatgttgaggtggtttttatacgggcgcagcgcttcggtcaccatgaacgggccgagatctgaaccaccaataccgatgttcaccacgtcggtgatcggtttgccggtatagcctttccagctaccagagataatcgcttctgagaagactttcatcttctccagtacagcgttgacttccggcatcacatctttgccgtcaaccacaattggcgtattgctgcggttgcgcagtgcgacgtgcagtaccgcgcggtcttcggtacggttaattttttcaccggagaacatcgacttgatagcgccggccagatcggtctctttcgccagatcctgcagcttagacagcgtctcttcagtgatgcggttcttggagaagtccaccagcatcagatcgtcaaaagtggcggagaatttagagaaacgatcgctatctttggcgaaaagctcgctgatagtgacgtctttcatttcatcaaagtgtttctgtaatgcctgccatgcagcggtctgcgttgggttgatatttttcattagcaatactcttctgatttgaaaaatgtgacttcggtcgattgtagcctcagcggcggaaaattgtgatgatttttgtgttatgccgttgacgggggtcagaaatagggtaaagagctcccatattatagcgatcattaggcttttttctgttatccgccgatgcatgaaaaatccgcataaccctgtcgttgacatacccgtccggaagcctttatatagctgaactgcctacggaaccgtaggtatgtattgctcgcgcatttcacgctacagcgaagagtatcgttggggggtataatgaccagtctctccccaggcatagtgaaagacgtcagtaattgccagaagaggtgcgttgcccaggtaaccgtattggaggaaccagtccggggataatacgtgagggggagcaacgccgaggcgcacagacatctggttaagtctgtcgccggccacaggggctgaatcccctgggttgtcaccagaagcgttcgcagtcgggcgtttcatactcgcgaaccgatgcgcgtcatcggcgaacgggtctacaaggtggagcacttctgggtgacatcgtagtttgtttatcgctctgcgcccaccctacttttcgctcttcccttgtgccatggctgagttaatttggcctggcttattaagacattttgtagcgctccggttatttccagcccgaaccaggagcggttgttcaggaatcgttttaataagtcaggccccctgacacgaggttgttatgacagatttagttgttgctaagttcggcggcaccagcgtggccgatttcgacgcgatgaaccgtagcgttgacgtcgcgctgctggatgcgaatacccgcgtagtggtgttatccgcatcggctggcgttaccaatatcttagttgctttagcggcagggctggaacccaccgaacgtttcgctaagctcgataaaatgcgccaaatccagttcaatattctggagcgtttacgttatcccaacgttattcgtgaagaaattgaacgtctgctggaaaacattactaccctggcggaagccgcctcgctggccagctcggaagccttgaccgatgaactggtgagccacggcgaactgatgtccaccttactgttcgttgagatcctgcgcgaacgcggtattgcggcgcagtggttcgacgtacgtaaagtgatgcgcaccaacgatcgtttcggccgtgccgaaccggatatcgccgcgctggcggagctaacgcaacaacaactggcgccgcgcctgcaagaaggcctggttattacccagggctttatcggtagcgaagccaaaggacgcaccactacccttggtcgcggcggcagcgactataccgctgcgctgctcggcgaggccttaaacgccagccgtgtggatatctggaccgatgtcccaggaatctacacaaccgacccgcgcgtcgcgcccgcggcgaaacgcatcgatgtgatcgctttcgctgaagccgcggagatggccacgttcggggccaaggtattgcatccggccaccctgctgccggccgtacgcagcgatattccggtattcgtcggttccagtaaagaacctaaagccggcggcacgctggtctgtcataaaaccgaaaatccaccgctgttccgcgcgctggcgctgcgtcgtcatcagacgctactaaccctgcacagcctgcatatgctgcactcccgcggcttccttgctgaagtgttcggtattctggcgcggcataatatttccgtcgatctgatcaccacctcggaagtgagcattgcgctgaccatggacaccaccggttctacctccgctggcgacaccctgctcacccaggcgctgctgaccgaactctcttcgctgtgccgcgtcgaagtggaagaaaacctggcgctggtcgccctgatcggcaacgagctgtcgaaagcctgcggcgtcggtaaagaggtgtttggcgtactggaaccgttcaatatccgcatgatctgttacggcgcatccagccacaacctgtgcttcctggtgccgggcgacgatgcggagaaagtggtgcagaagctgcatcataatttgtttgaataatcgcgacgggaaagcccgttagcaaaaggcccggtttcgtcagaagccgggccttttttatggcgccagtaccgtgctcatcagcaagcgatcgagttgctcaacgcgccccgttcggctatccggcagctccggcgctacctcgccacgcgccagctcatgttgaataaaggcatgcaaaagcgggcgtcgtataccgtactctgcttcgccggcacgttgtttgcgaaccagcagctcatcgatttcattacgcagtgcgggttccagttcgctacccgccagcagttcgctaaaacgcatcggcggcacgcctttaccagcttcaacccagcgcacggccaacagcgggcgcagtacataaaagtattttttcaaccgtacctgctcaccctgcaggtagccgcgaaagttcttccgcgccattgaatagtagtgccaacgggcgcgcagcggcgaaaaccactgcggcaccagcgcttttaacgccgccactgtcgacgcgtcctgctgatacaccaccggtgaatccagccactctataagagtagggttcgccgctttcaatagccccagcgctttgcgccactcccagccgcagacatccagctcatcatctatcggcagttcgataacatcgcgctgcgcttccacgcgtaaataccattcggattgatgaacatataaaaagcgaacatcataatcgctatccggcgaggcaaaaccccagccgcggctacccgattcacaggcatacagcaccctgacctggtagcgttgttctatgtcggctaactgccgccgcacgcgctggcgcatcgcggcatcgacgctattttcactcattattttttatcctttaacacagacgacctgacgcagggtatgtaccacctctaccagcgacgattgcgcggccatcaccgcctcaatgtctttataagccagcggaatttcgtcgatcacctcactatcttttcggcattcgacatgggcggtcgtgcggatctggtccgcgacggtgaaccgctttttcgacgccgttcggctcatcacgcgtcctgcgccgtggctacatgagcagaaactctctttattacccaatccgcgcacaatgaagctttttgcccccattgagccgggaatgatgcccatttgccccttctgcgccgataccgcgcctttacgcgtgaccagaacctcttcgccaaagtgccgctctttctgcacatagttatggtggcaattgaccgcctcctgctgggtcataaacggtttcgtcacaatggccgatagcgccgccagtacccgcgccatcattacctcgcgattatgcctggcgaaatcctgcgcccattccaccgcctcgatgtaatcctcgtagtgcgggctaccttcctgaaagtaggccagatttctgtccggcagattagcgatatgctgctgcatatcgttctgcgccagggtaataaacaggttgccgatagcattaccgacgccgcgcgaaccgctatgcagcatcacccatacccgctgctgttcatccaggcacacttcaataaagtgattgccggtacccaatgttccgagatgctgatgattattggttttcaacaactgcggatatttgtccgtcaggcgcttaaagcgcggagccagtagcgaccactgctgatcgacttcctgcggcggcgtctcccaggcgcctttatcgcgccgggagcgcgtattagttcgcccgtgcggtaccgcctgctcgatcgcgctgcgcaatccgcccaggttatccggcagatcgctggcaatgagcgaagtacgcaccgccatcataccgcagccaatatccacgccgacggccgccggaatgattgccccttttgtcgggatcacgctaccaatggtcgagcctttcccgagatgcacgtccggcatcaccgccagatgtttaaagacaaacggcatttttgccgtattcagcaactggacgcgtgcttccggctctaccggcacgccgcgggtccacattttgatcggcgcgctattttccgccgtcagcaggtgataatcgttatgcgccatggttcactccattaatgttgataagtccatgtaatacctggtccagcccgccaaatacggagattttatcgattcgctccgcgacgcgttcgagcgtttcaagctcttttaagcgcagggcgaccggattgttttccattactttggccgtgttcaataaagaacgagttgccgccgtctcttcccggcggcggataacgttggcctgggccgatttctccgcttccaccaactgcgacaaaatggccttcatgtcgcctggcaggacgatatcttttactcccaacgaggcgatttcgatgccgaatggcgccatacgctctttcacctgcgcgctcaccacttcatcaatcatctgtttattttccagaagctcatccagcgtacgtgtaccgaccgcttcgcgcagcgcgaactgcagttcacgatacagatgatccagcggtttagttaactggcaaaatgccgtcagcacgtcttgataacgccagttcgccgccagattcagacgtaaattaactttgtctttggtcaggatctcctgaccgctgacctccagcacctgcagacgagtatccaccacttcggcttccaccagatggttaatcttccagtaggcagtcaaaccgggaggtagagctttctgcagctcgccgtcaattttcaacaccccaacatgccaggcaggaacctgtaccgtcagtatcgactcacgcccttttaccgcgccgctgcgtcgaggttgcagtaccgcgttcatcacctctgcgggtaccagcaccgcgcgagtatccatacgtaccagcttcagcgcattgtcatattgccagtacagacggcgcgtcgctggcgggatgatctcctgcagtacgccatcgatatacagcgcgccggcttcctcttccgccatatcagccgccaggcagtaacggtcgatccattcaggctggaagcggcgcatatagtcggccaacgcctgcggtacttcgctgccatcggtggtgacgatcagcacttccggtgtggaaaaccacggtaagcgatgctcgccggcttccagcacctgataatagtcgcccgctttcgccagcagacctaattgaccttttcgtatcgtcattttcttagccattattcgttccttaaaaatggagcaggcgcggatgcaaaggcgaaacggcaggggaactctcttttgcctggcgcccggcgttattatcggcaacctgttttggggaccgccaaacccgcagttccccggtttattattttgatttacaaccagtttcatcgaggagatgaatgagggaatcgaaccctccacttttgtggtcagttgctgacggaacgcggcagaaaaacggactgcgccgtttctacagcgccggcggggtttaaccccctgcatttcagcgcgttgacaatagagttattgccagaagcgtgccaaaaacgtaaaacaacaaaataatcttttaacaaaatgaaaattaatgacttttatttattaagcatctattcagattgcctacggcaagatatatttttatccttaagtatctaattttatcttgcaggataaatcatgagaaaacgtcgggtggttattggcgtactggggacggtactcgataaacgtggcaagcgcgccaaccgttttcgcaagtggcggccaacggttgggttgtgccaacaagctgaaatgcccattgatcggctggaactactgcatcagccgcgtgacatcggcatggcgcagcagctcgccgaagatgtggcgttggtctcgccacagaccgaagtacatccgcatgctgtagccatcgctaatccctgggatttcgaagaggtgtatgccgcctttcttgattttgcgacccgctacccgttcgataccgacaatgaagagtatctggtgcatatcaccaccggaacgcacgtggcgcagatctgctggttcctgttgaccgaggcgcgctatctgcccgccagtttgctgcagaccgggccggcgccaaaaggcgccaccgacgagcagatcgcggccggtaccgcctcggttatcgatctggatttaagccgctatgccactctaaccagccgttttcagcgtgaacaacagcagtccgtttcatttcttaaggacgggattgaaacccgcaacgccaccttcaataagcttatcgatcgcattgagcgggtttctctgcgttcaaccgatccgattctactcaccgggcctaccggcgcgggcaaatcctttctcgcgaaacgcattttccagctacgccagtcacgccacctggtggcgggtaagtttgtcgccatcaactgcgccacgctgcgtggcgataacgccatgtcgacgctattcggccacgtcaaaggcgcttttactggcgcgcaagcggcgcgtagcggcctgctacgcgaggccgatggcggcgtgctgtttctcgatgaaattgccgaactgggcctcgatgaacaggcgatgttgttaaaagcgattgaagaaaaaagctttttcccgtttggctccgacaaagaagtgcacagtgattttcaactgattgcgggtacccaccgcgacatgcgccagtgggtcgccgatggccgctttcgtgaggatttatacgcgcgtatcaacatgtggagctttgcgctacccggtctggcgcagcgtagagaagatattgcgcccaatattgagtacgaattgcaacgtttctccagcgccagacagcagcaaatacgttttgataaagacgcgcgcgtgcgctatttggctttcgccagttcgccgcaggcccagtggcgcggaaattttcgcgagcttggcgcctcggtgacccgcatggcgaccctcgccgaacagggccgaattacgctggatgtggtcgatgaggaaatttcgcgactgagcgagagctggcagatcaacgatcctcttcccgccgtcatcgacgagatcgatctgttcgatcgccgtcagttggaaacggtgctggaggtttgccgccgcagcgcttcgctatctgaagccggccgtgagttgtttgcggtctcccggctgaaaaaggccaatccgaatgatgccgaccggttacgcaagtacctcgcccgctttggtctcagttgggaaagcctgggctaatcatcatgagcataatttgtttgaatattattccttagcgcgataaacaatagctatagccgggctcgaacccggcttttttataacaacatcaacacaacaaacactgtcgcaaggaatacactatgctcgccacgcttacgcggctgttcccgttatgggcgctgctgctctccgtattggcttattacacgccaaccacttttacccctatcggcccgtgggtcaccacgctgctgatgctgattatgttcggcatgggcgtccatttgaagctggacgattttaagcgcgtgctgtcacgtccggcgccggtcgctgcgggaatttttctgcattacctggtgatgccgctcgccgcctgggtactggcgctgctgttccacatgccgccagaactctccgccgggatggtgctggtcggcagcgtcgccagcggcacggcatccaacgtcatgatctacctggcgaaaggcgatgtcgcgctgtcggtaaccatctcttccgtttctacgctggttggcgtggttgccacgccgttgctgacgcgcctgtacgttgatgcgcacattcaggtcgatgtgatgggcatgttgttaagcatcctgcaaatcgtggtgatcccaatcggcctcggtctgattgtccatcacctgttgccaaaagtggtaaaggcggtggaacccttccttcccgccttctccatgctgtgcatcctggcgattatcagcgccgtggtcgccggttccgcatcgcatatcgcttcggtaggcctggtggttatcgtagcggtgatcctgcataacgccattggcctgctcggcgggtactggggcgggcgcctgttcggttttgatgaatccacctgccgcaccctggcgatcgaagtgggtatgcaaaactccggcctcgccgcggccctcgggaaaatctacttcggcccgctggccgccctgcccggcgcgctgttctcggtatggcataacctttccggctcgctgctggcgggttactggtccggtaagccgacgaccaaaaaaggcaaccagcgctaatcggtatacgtccgggcaaatgcccggacgttttgtttatcccacctgtaaactcaccggcttgcctaacttcattaacatcatgaccaacgcatcaagggtaaacttactggttttctggtttaccacatctgaaatacgtggtcgtgaaatattcaacttcgctgcagcatccgcttgcttcagttgattttcatctatccactcagcaatttcctgcatgagttgccgcttaagtatcattagctgttcgacttcttgttccgcttgcgcccttaaccgctccgcttcacagtcatcaaagccgagttcactgaaaatattcgtctctgctgccgtcacgtgacggatgccatccactgtcttacgattcatttacgactcctgtgttcctgcggtataagctgcaaacggcttctgacaatttgtttttcatgttcggcggtacgtcgagtttttttgttaaaacagtgcaggacataaacctctgcctcaaaacgagcaaggtaaatcacccgataagcgccggaataatgacgtaaccgtatttcctccacgcctcgacccaactgaggcattgctttccaatcagcagcttctaaccccgcctgtaaacggtaaagctggaaaccggcatcacggcggacctcctcaggaaattggcgcaaatcatcaaaggaagaccccatccagacaatacgtcgtaaactttgcccttgattcaacataccacatccttgtataaaattttatacacaaatcgcgcaaaaataagtttgcggatgaccacataaaccatgccgctacgctaatccagacaacatcatcagtcacccacgcagcaaatattctgcgaggcattttccggattagttctattttgcgctgattgccgtacactgggttctctggtctgattgagggcaccaccatggcactcccccgcattacacaaaaagagatgaccgagcgcgaacagcgcgaattgaaaacgctgttggaccgcgcgcgtatcgcgcacggccgcccgctgagcaatgcggaaacgaacagcgtaaaaaaggaatatatcgataagctgatggcggtgcgcgaagcggaagcgaagaaagcccgccaggcgaaaaaacagcaggcttacaaagtagacaaagaggcgacattttcgtggtcggcgaatacgccgacccgcggcaggcgttagcggcctttctttttacgtcccggctgagcgaaacgtttaccgttcgaggccgggcggcctcctttatcgttggttttttccatcttcaccaccgggcgcttgatcccggcggtcgccgctttggccttcggtttagcttttggcttcgcttcggaagaggagttttcaatcagcttgaacaggtcgatcagctcatcatcggttaaatcgcgccactcacccaggggaatgcccgtcaggctaacgttcataatgcgcgtccgctccagcttcgtgacttcatagccgaaatgctcacacatgcggcggatctgacggtttaacccctgaaccagcgtaatgcggaacacgaacggcgcttctttcttgaccttacatttcttggtcacggtaccaagaatcggcacccccgcgcccatgccacgaataaactcatcggtaaccggcttatcgacggtgaccagatactctttttcgtggtcgttgccggcgcgcaggattttgttgaccagatcgccatggttggtcaggaaaattaacccctgggagtctttatcgagacggccaatcgggaacacacgtttgctgtggttcacgaagtcgacaatattatcgcgctcgccatcttcggtagtgctgacaatacctactggcttattcagcgcaatcagcaccaaatcatcggcttctcgcggctcaatcagctgaccgttgactttcaccacatcgcccggcttcacctgatcgccaatggcggcgcgcttaccgttgataaagacgttgccttgttcaataaagcggtccgcttcgcgacgcgagcaaatcccgctttcgctgatgtatttatttaatcgagtagatgagtcggtcagcatagtttctcctttgacagcgaaatatacctcaccttactggcgataaaaaacagggatagcgttattcattaccccattgattgaggaaattggcgatatcgtcgatacgctgttcggcaatgcctgcttcacgggccatctcctgctgcgcttcctcgctgatctcctcgttattcattaagcgcgtaatcagcagctggaagtaatgcgccagacaatcgcgctcggaatcttttaccgcttctgcgcactccgtcgagtactcatccacgatgtcataatatttcagcggtatttcattgttcataggtcgtctccggggtggctagcatctgcgctttcggccccgatgatagcattcagcttatctgcaccgtgagccatatcagcgccccgacgccgggccaatgatagaatcggcgtcaaatgacatgtttacacaggatgaaaagatggaactgctgttactgagtaactcaacgctaccgggcaaagcctggatggaacatgcgctgccgctgattgccggccaggtcaaaggccgccgttcggcggtatttattcccttcgccggggtgacgcaaagctgggatgattacaccgccaaagccgccgccgtcatggcgcctatgggcgtcagcgtgaccggtattcacagcgtcgccgaccctatcgccgccattgaaaacaccgagatggttatcgtcggcggcgggaacaccttccagcttctgaaagagtgtcgcagccgcgggctgctggcgccgattgtcgatgtcgtcaagcgcggagcgttgtatatcggctggagcgcgggatctaacctcgcctgcccgaccattcgcaccaccaacgatatgccaattgtcgatcctcaggggtttgacgcgttagggctgttcccgctgcagattaacccgcacttcaccaacgcgctgccgaccgggcatcagggtgagacccgcgagcaacgtattcgcgaattgctggtcgtggcgccggaattaacggtgattggcctgccggaggggaactggattcaggtcagcgacggacacgccacgctcggcggcccgaacccgacgctgttgttcaaagcgggagaagaagcggtaaccctggccgcgggacaccgtttctaggctggtttggcgaacattacccggatagcggcgtgttgcgccttatccgggctaccctgcgtaaatcccgctaataatcatcccgctcgtcgtcttcatccggctgctccatcacgctataggcaacagcgcagaacagcgagttcagacgcttcatatcgcccagcagcgccagatgcaacgtactggtttcaatactctgcacgttttgctgatgcaggcggtcaacatgcgcgtgcgagtaacggcggttaagaatacgaaaacggtgcttactgcggcgcaaccgacgggcgctcggcacgtcgccggaaaagaagaccgacattgccagctgcaggttactaagcagtagctcgtataacgcatccagctcttttagcccctcgacggaaaatgcgcgccgcgccgccagtgatttatcggcgatctcgctgcccattcgctcgacgatgtcagacgcctgctccaggttgagcgacatctcgataatttccgcccagcggcgagactcctcttccgccagctcgtccttcggcatccgcgccagataaagcttaatcgccgtatacagcacgttgatatcgtccgccatccgccgcagctctttctcttcgcgcggctcgccgtgcatcaccttgcgcaggctttccagcatctgctccatggcgtcgccgatacgtagggtttcacgcgcggcattggccaacgccaatgccggcgtatccaacgccgagggatccagatgcttcggcttgagatggttatccagctccggctcatcgcggatcaggcgtttacacagattcgccatcggcccggcgaacggcaccatcgccacacagcgaatcaggttgtagaagacgtggaagtagatgaccagctccgactcttccagcggcaatttgtgcatgacatccgccagtacgtgcacaaatggcaaaattatcaagctccccaccagcttgaacagcaggctgccaagcgccacccgccgcgccgccgcgttggcgccgctgttgttaagcatcgccagcagacctgagccaaggttagcgccgatgaccagacatagcgccaccgggaaagagatcaccccggtgccggttaacgttgcggtcagcagcacggccgccaggctggagtaactgataatggcgaacacggcgccaatcagcgcatccagcatgatatcgccggtcagcgaggcgaaaatcacctgaacgccgttggcctgggtaatcggatgcaccgcctggacgatgagctccagcgccagcaggatcagcccgaggccgatacccacccgcccaagctgacccgcgcgcgtctgtttacgcccgaggaaaaaaataacgccgataaatatcagcagcggcgatagccaggagaggtcgaaggtcagtaccctcgccatcagcgccgtccccacatccgcacccagcaccatgaccagcgctggcgccagcgcgaccagatcctgggccacaaacgacgtcaccagcatggtggtggcgttactgctctgcaccagcgcggtgacgccaatccccgcgcagaaggcgagcggttttttctccacgctactgctgagcacggtacgcaggcgtgcgccaaagacgcgcatcacgccggtgcgcacaatatgggtaccccacaccagtagggctacggcggaaagtaggtgtaacagcgttaacacagaatcagcttctccttatcgttataagtgttcctgaggtttaaacctcccttcagtataaggggttaacttcaataaagagacaaggcgctcaaagagcgccttgtttgttgtaacgaaacatatttcgttagtcagcatcatagccgaggttaggggcgagccaacgctcaacttccgccgccgtcatccctttacgcagggcgtaatcttccacctggtcgcgctgaatctgcgccacggcgaagtacttactatcaggatggctgaagtaccagccggaaaccgatgcgccaggccacatggcgaaggactcggtgagcttcatgccggtatgcgcttccacatccaacagttcccagatggtcgctttctcggtgtgttccgggcaggccggataaccgggcgccgggcggatcccctggtaattttcgcggatcagctcttcattgctgaggttctcattggccgcatagccccagtaaaccttacgcactttctcatgcagatactcggcgaaggcttccgccagacggtcagcgatggccttaaccatgatcttgttatagtcgtcgtgctgcgcttcataggcttccgccagcgcgtcttcttccagcccgccggttaccgcgaaagccccgatatagtccgctttaccgcttagcttcggcgcgacaaaatcggcgaggcagtagttcgcgaagccgactttttcagtttgctggcgcaggtgatggctgaccgtcagcacgtgggtgcgggtttcatcacgatagatttccacgtcgtcgccaacgcggttggccgggaacagcccgaccacgccgcgcgggttgagcgttttttcggcgctgagtttatccagcaaatcgttggcgtctttaaacaggcgttgcgcctcttcacccaccacttcatcttccaggatacgcggatatttacccgccagcgaccaggtcataaagaacggcgtccagtcgatgtagttacgcagcgtttcgatgctggcttccacctcctgcacgcccaggcgatggactaccggcggcgtgtagctctcccagtcaaacgccagatcgttttcccgcgccgcctgcagagtcaccggcggcgtgcgcggctttttacgcccgtgctggattcgcacggtttcatactctttacgggtacgggcgacaaaatcatcgcgctgggttgccgacagcagggctgaaaccacgcctacggtacgcgaggcgttctgcacgtagaccgtcgggccactgtagttctgttcgattttcaccgcggtatgggctttcgaggtcgtcgctccgccaatcagcagcggaatggtaaagccctgacgctccatctctttcgccacgttgaccatttcgtccagcgacggcgtgataagcccggagagaccaatcagatcggcgttttcctcgcgcgcggtacgcaggattttctctgccggcaccatcacgccgagatcgataatttcgtagttgttgcactgcagcactacgccgacgatgtttttaccaatatcgtgtacatcgcccttcacggtggcgatcaccatcttaccgttgctggagccctgttctttgctggcttcgatgtaaggttcgaggtaggccaccgcctgtttcatcacccgcgcggattttaccacctgcggcaagaacattttgccttcgccgaacagatcgccgaccacgttcatgccgtccatcagcggcccttcaatcacctcaatcggccgttcggcctgctggcgcgcctcttccgtatcctgctcgataaattcggtaatccctttgaccagcgagtattcaagacgctttttcacctcccagctgcgccattccgcctgctgagcgttcgcgctatcgtccgctttgctgccgcgatatttttccgccagctcaagcaatctttcggtactgtcatcgcggcggttaaggattacatcttcaaccgcgtcacgcagctcgccaggcagatcgtcgtatatcgccagctggccggcattgacgatgcccatatccataccgttgcggatagcgtagtagaggaagacggcgtggatcgcttcacgtaccggatcgttaccgcggaacgagaacgacacgttggagacgccgccggaaatcagcgcatgcggcagctcgcgtttgatgtcttcgcaggcgccgataaagtcctgagcgtagttgttgtgctcttcaataccggtggcgacggcaaaaatgttggggtcgaagatgatatcttccggcgggaagccgacctcttcggtgaggattttgtaggcgcgacggcaaatttcgattttgcgctcgcgggtatcggcctggcctacttcatcaaaggccatgaccaccattgccgcgccatagcggcgaaccagcttagcgtgatgaataaagggttcgacgccctctttcatcgagatcgagttaacgatgcccttgccctgaatgcacttgagccctttttcgatgacttcccacttggaggagtcgatcataatcggcacgcgggcaatatccggttcacccgctatcaggttgaggaaacgcaccatcgccgcttcggcatcgagcatcccctcatccatattgatatcgataatctgcgcgccgctttccacctgctggcgcgccacgtccagcgcttcgctgtatttctcttctttgattaagcgcttaaatttagcggagccggtgacgttggtccgctcacccacgttgacgaacagactatcatcgccgatgttcagcggctccaggccagacagacggcaggcgaccggcagtaccggcagctggcgcggcggcaagccttctaccgcccggctcatggcggcgatatgttccggagtggtgccgcagcaaccgccgacgatattaaggaaaccagcctgcgcccattcgcgaatttgcgccgccatggtgtcggcatccaaatcgtattcgccgaaggcgttcggcagtccggcattcgggtgcgcggtaacgtagcattcggcgatccgcgaaagctcctgcacgtactggcgcagctcatccggccccagcgcgcagttcaggccaaaggtcagggcatcggcgtggcgcagcgaattatagaacgcttcggtcgtctgcccggacagtgtacgtccggaggcatcggtgatagtgccggaaatcataatcggcaactcgacgccgagcgcctcaaattcttctttgaccgcgaaaatcgccgctttggcgttcagggtgtcaaagaccgtttcaataagaatgagatccgagccgccttccaccagcgctttggtggattcacgataggcggccaccagctgatcgaacgtgatattccgaaatgccggatcgttgacgtccggagaaatagaagcggtgcggttggtcggcccgagcacccccgccacatagcgcggtttttccggcgtacgcgcggtccacgcgtcggcgctggcgcgggccagctttgcggcggcaaagttgatttccgccgacagggattccatttggtaatccgccatcgcgatggttgtcgagttgaaggtattggtctcgataatgtccgcgccggcggcgaaataggcgtcgtggatctcgcgaataacctcaggcttgctgaggaccagcaggtcgttattgcctttcaggtcgcacggccaatcggcaaagcgttcgccgcggaaatcctgctcactcagacgatagccctggatcatggtgcccatgcccccgtccagaaccagaatgcgttctcttaactgctgatgtaattgttctactttgttactcacacagactcccgacagcgctcaactcagaccaaaaagccaacaaaccatactggcataaaccaacctgccggaaaaggaaacctgcagcaacatgagacaagttcaacttcactcctccgatcagtctggttgtgattgcattatcgccaaataaaacgaaaatcatttccacgatacagaaaaaaggagttcatcatggctaccccggttcccgccaaacgcggcagaaaacccgccgctgccgcccctgccgcgcaggccggcgggcaagtgcagtcgcttacccgcggcttaaaactgcttgaatggatttctgaatcgcatagcagcgtcgcgctcaccgaactggcgcagcaggcgggactgcctaactccacgacccatcgtctgctcaccaccatgcagcagctcggttttgtccgccaggtcggcgatctggggcactgggcgattggcgcgcatgcgtttgtcgtcggcagcagcttcctgcaaagccgcaatctgctggccatcgtccatcctattctgcgccagctgatggaagattccggcgaaacggtcaacctggcggtgctggataaaagcgatcatcaggcgattatcatcgaccaggtgcaatgtacgcagctgatgcgcatgtcggcgccgattggcggcaaattgccaatgcacgcgtcaggcgccggaaaagcgtttctgtcgcagttgagcgaagaagaggtcaccacgctgctacatcggaaagggctgcacgcttacacccacgccaccctggtttctccggtacatttgaaagaggatttggcccaaacgcgtaaacgcggctattcatttgatgatgaagaacatgcgctggggctgcgctgtatcgcctcctgcatttacgacgaacaccgcgagccgttcgccgctatctccatctccgggccgatttcacgcatgaccgatgaccgggtgaccgagcttggcgcattggtcattaaggccgccaaggaagtcacgttggcatacggcggggttaaataataaaaatgccccaaaggggcattttaagtaggcctgataagcgtagcgccatcaggcagatcggcgcaccttgccggatggcggcgtaaacgccttatccggcctactgtcggcgccatagcgcacgctaaaacgctgcttacgccggtaagcgtaaacatcttccacgtgcccgtttttaattcgcgtctgtaattcgcgccagtaatcggcacgcagcaaatcggcgtgcatctcctccagtagcggcccgatccgcggatcggcgcacaaccagtgacggaactcttccgggaagacatcgccaggggacacgctataccagggttcactagccagctcatcttccggatagcgcggcggcggaatatcgcgaaaattcacctctgtcatgtagcaaatttcatcgtaatcatagaataccacccgcccgtggcgcgtgacgccgaagtttttgaacagcatgtcgccggggaagatattggcggccgccagttggcgaatggcattaccatactcttctaccgcgtcgcgcagcgcctgaccttccacctgctccagccagatattgagcggcaccatccgtcgttcaatataaagatggctgatggcaatgcgatcgccgaggtcggtcaacttatttcccgcttccgcctgcaacagcgtcatcagctcgggcgcaatttgccgcttatcgagcacaaagttttcaaattcctgagtatccgccatccgcccgacgcggtcgtgttctttgaccagctgatagcaggcgcggacgtgggcggcagtcatctctttttgcggcgcaaagcggtctttaatcaccttaaatacccggtcgaatcccggcagggtaaagaccaacatcaccatcccacggatgcctggcgcttcaataaactgctcatcgctgcgggtaatatagtgcaggtactcgcgataactttccgttttagcatgcttctggcagccaatcgccatatatagctcggcggtagtttttcccggcagaatctcgcgcagccattcaaccagcgccgcgggcagcggcgcgtagaccatgaaataggagcgggcgaaaccaaagacgatactcgcctcggcgtgggtcgtcaggcaggtatccacaaacagctgaccgtcatcgctacgatgtatcggcagcaggaacggcagcgtcgccatcggcgtaatcagtttacccaccagccaggcggctttattacggtaaaacagctcattcgccacctgcagatgcgactgcgacagcaactcgccgccaagcgcttcgcgtaaatgactgacgatataaccgatatcacgccctttgttttgccacggcaggcgcagcggcaaatcggcaagcaggttatgcatcaggtattcccagccgcgttcgggataaaagtccttcgccagcggtcgcgaaatcgtgcgaaaacgccgttccggctgggagctgaaaataaagagccgctcgggggtcagcgagcggtggtcaaacagtcggcagtagaccgagttgaaaaagctctccgcaatttcaaagcgagggtaatccggcaaaagttgggtgtactgctgtttcacccgcagaagaaaatcgacgtcggtacttttcccttcggtaatacagcgcagctgttctaccaccagacccacgtggtgatcgtagaggtggatacgctgcttcatcgcctgctgcacggcgtgccagtcagcctgttcaaagcgctgctgcgcgccggaagtgacttccagaaaacgcccgtactgggcgtcgaatccctgtaaaatggtttgggcaatcagtagttccaggccacgcgtcatcgctttcccccatccggcacaacatcatgccggatggcgcgttcgcttatccggcctacacctttgtaggcccggtaagcacagcgccaccgggcattgcttaaaactgcgattcttcggtcgagccggtcagcgccgttaccgacgaggtccccccctggataatggtggtcactttatcgaagtacccggtacccacctcctgctgatgcgacacgaaggtgtagccttccggcccggcagcaaactccggctgctgaactttttcgacgtagtgacgcatgccttcaccctgcgcgtaggcgtgggccaggtcgaacatgttgaaccacatgctgtgaatacccgccagggtaatgaactggaatttatagcccatatccgacagctgctgctggaagctggcgatggttttatcgtcgagatttttcttccagttaaaagatggcgagcagttataggccagcagcttgcccgggaagcgggcgtgaatcgcctcggcaaaacgacgcgcctgttcaatgtccggtttggaggtttcacaccataccaggtcagcgtaaggggcgtaggccaggccgcggctgattgcctgttcgattccggcatgggtgcgataaaaaccttcgctggtgcgatcgccggagataaactcgcgatcgtaaggatcgcaatccgaggtaatcaggtcagcggcatcggcgtcggtacgggcgataagcagcgtcggcacgcccatcacatccgccgccaggcgcgcggcgaccagcttctgaatcgcctcttgtgtcggcaccagcaccttgccgcccatatgtccgcacttcttcaccgacgccagctgatcttcgaaatgcacggccgctgcaccggccgcaatcatcgatttcatcagctcaaaggcgttcagcacgccgccaaaaccggcttccgcatcggcgacgatcggcaggaaatagtcgataaaacgcggatcgttcggctcaatccccgccgcccactggatctgatcggcgcgacggaaggtgttattgatccgatcaaccaccgatggcaccgagttagccgggtacaacgattgatccgggtacatactggaggccaggttggcgtcggcggcgacctgccagccagacaagtagatggcttcaatgcccgccttcgcctgctgcagcgcctggccgccggttaacgcgccaaggctgttgatataaccctttttcgcttcaccatgcagcagacgccacattttcgccgcgccaagctgcgccagcgtgcactccgggttcaccgagccgcgtaacttcaccacctcttccgcgctgtatgggcgggtaatgccttcccagcgcgggttcgtccactctttgtttaattcttcgatttgttgggtacgggttttcatgtgcagatgctccatattgtgatggggtgaattacgccagcaggcggtaacctggcaacgtcaagaagtcgatcagttcgtcggaagtggtgatttgctccattagccgcgccgcatcgtcaaagcgaccgtggctgaagcggtgttcccccaactcttcctgaatcaccatcagctcttcagccagccactggcggaacagcgccttggtaaccggtgtgccgtcgttcagggttttctgatgatggatccactgccagatagaggtacgcgaaatctcagccgtcgccgcatcttccatcaggccgtaaatcggtacgcagccgttgccggagatccaggcctcgatgtactgcaccgccacgcggatattggcgcgcatgccggcttcagtacgctcgccctcgcagggagccagtaactgctcggcggtaatcggcgcgtcgtcatcgcgggtaacaaacagctggttaggatgttcgcccagtacgcggttaaagacgtccattgcggtatccgccagtcccggatgcgcaatccaggtgccatcgtggccattgttagcctccagctctttatcggcggtgactttattcagcacctgacgattgcgctcggcgtctttgctcgggataaacgccgccataccgcccatcgcgaaggcgccgcgcttatggcaagtcttaatcagcaggcgtgaataggcgctcaggaaaggtttatccatcgtcaccacctgacgatccggcaggacacgatcggggtgatttttcagcgtcttgatatagctgaagatatagtcccagcgcccgcagttcaggccaacaatatggtcgcgcagcgcatgcaggatttcatccatctggaacactgccggcagcgtttcgatcagcaacgtggccttaatggtgccgcgcggcagttcaaaacgatcttcggtgaaactgaagactttgctccaccatgccgcctcttgccaggactgggttttcggcagatagaaataggggccgctccctttcgccagcagtgcccggtagttgtggaagaaatagagcgcaaaatcgaacagactgccgggaatcgcctcaccacgccaggtaacgtgtttttccggcagatgcaggccgcgaacgcggcagaccagaaccgccggatcgggctgcaactgataaattttccccgcttcgttggtgtagctgatggtgccgttgaccgcatcacgcaggttcatttggccatcaatgactttgtgccaatccggcgccagcgagtcttcgaaatcagccataaagactttgacgttagcattcagggcgttaattaccatcttgcgttcaaccggaccggtgatttctacgcggcggtcctgtaaatcggccggaatacctcgaatcttccagtcaccattacgaatggaagccgtttccgaaataaaatcaggaagatttccatcatcaatggcctgctgttgctggacgcgtaccgccaacagttgattacgctcaggcataaagcggctcaccagttccgtcaggaactccaccgcttccgcagtcagaatttgcttctcctgctcgccataaggctggctgaaggccagttcatcggtcattgtcgcctggtgcgtcattgtgcagctcctcttggttgatcctggtagcgcgaacgaaagatcgttgtctgcttttcgctcagcacaattaagactactcaagaattttccaaaatcaaaaacaatttccattttcaatttaaaatttatacaacatcttgataacaaagaaattaaagtttaaatagaaggggaagtgattttcggaaataaaaaaggcacccgaaggtgcctgaggcgagatgctgaaacgctttaggatcgcacgcgctggtagattaatccagcgtgggattcatatgtcgcagatcgtatggcgtgatttggtagacgtaatagttaagccagttggcaaacaggagattgccatgactgcgccaggtcgcccgcggtttattgtttggatcgttattcgggaagtagttgtccggaagctgtggcgctaaacctgcctccagatcgcggaagtattcacttgccagagtatgcggatcgtattcagggtgaccggtaacaaaagcgatacgcttgtctttgctggcgaacagataggcatcgccatcttcggtttcagcaagaatatcgaggtcggtgtagtcacgaatcagcccggccgggaagtcggcatagcgcgaatgaggcgcaaggaaggtgtcatcaaacccgcgagtcagcagcgcatgcgggtgcaaaatatggtgttcataaacgccagagatcttttcggtacgagtttgcttggggatgccatacagaatattcagtgccgcctgtaccgcccaacagacaaatagcgttgacgtgacgtgatccttagcccactccagtacctgtttaatctgcggccagtaggcaacatcattaaactcgaccagccccaacggcgcaccggtaacaatcagaccatcgaagttctgctcgcgaatatcttcgaaattgcagtaaaagttattcaggtgctccgtcggcgtattacgcgactcacgcgcatcgatgcgtagcagctggatatcaacctgcagcggcgagttcgacagcagccgcaggaactgattctccgtctcgatcttcttgggcatcagattgagaattaacaccttcagcgggcggatttcctgagttgtagcacgcgatgtggtcatcacgaagacgttttcatcgcgcaagaaattgacggccggtagctcgtcctgcacccgaattggcatagctgtatcacctcattacatacgtataaacgtttagacatccagatagctgacaataaccaggaataaacaaaatgtcgagtctgcaagcggaaggtgagaaagtttcaatatcgacaacagccgtcaggacgtggaattagccagcaacgcacgaacttcaacatcgttgcgtacatggctgctgcagcgaacttcaagctggcggtaacgcattgatacggcgctggcaaccatttccattattgcgcgctcttcgacttgtgataaccctccttcatttaactccatggcatcgaccagaatgcgaaagcgctttcttttcagcaaacgcgccagccagttttcgcctttttgttgttggatcaggggatataagacgtcatgcgcggcaaaaaactgtgccacgaggagacgttgattgctaaatgccccgctgccactgtattcgcggctatcatcgaggttgcgtacggtcattcggtttttatacaacgagatatataagatggtcacgcgtcctttcctgtttcagcaagatcctgagaggataataacagctgacaggagactttagacgctccgtatcaagtttcggaatagggcgtgggatttccccggaggcggtgctgcgcaccttttccgggctacggggtctgtagccctggtaagcgcagcgccaccgggggagatggcggcgcgtctggccgcaaaacaccaaaacaaaaggcccggtcttccgactgagcctttcgtttacgttgctatgacagcggctttccccggaggcggtgctgcgcaccttttccgggctacggtttttgtagccccggtaagcgcagcgccaccgggggagatggcggtgcgtctgaccgcaaaacacaaaaacaaaaggcccagtctttcgactgagcctttcgttttatttgatgcctggcagttccctactctcacatggggagaccccacactaccatcggcgctacggcgtttcacttctgagttcggcatggggtcaggtgggaccaccgcgctatcgccgccaggcaaattctgttttcaacacgtcctcaggacgcatcgagtaatctgtatcaggctgaaaatcatctcaaatcgccaaaacaccttcggcgttgtaaggttaagcctcacggttcattagtatcggttagctcaacgtatcgctacgcttacacacccgacctatcaacgtcatcgtctttaacgttccttcaggagacttaaagtctcagggagaactcatctcggggcaagtttcgtgcttagatgctttcagcacttatctcttccgcatttagctaccgggcaatgccattggcatgacaacccgaacaccagtgatgcgtccactccggtcctctcgtactaggagcagcccccctcaattctccagcgcccacggcagatagggaccgaactgtctcacgacgttctaaacccagctcgcgtaccactttaaatggcgaacagccatacccttgggacctacttcagccccaggatgtgatgagccgacatcgaggtgccaaacaccgccgtcgatatgaactcttgggcggtatcagcctgttatccccggagtaccttttatccgttgagcgatggcccttccattcagaaccaccggatcactatgacctgctttcgcacctgctcgcgccgtcacgctcgcagtcaagctagcttatgccattgcactaacctcctgatgtccgaccaggattagctaaccttcgtgctcctccgttactctttgggaggagaccgccccagtcaaactacccaccagacactgtccgcaaccccgattaggggccaacgttagaacatcaaacattaaagggtggtatttcaaggttggctccacgcagactggcgtccacgcttcaaagcctcccacctatcctacacatcaaggctcaatgttcagtgtcaagctatagtaaaggttcacggggtctttccgtcttgccgcgggtacactgcatcttcacagcgagttcaatttcactgagtctcgggtggagacagcctggccatcattacgccattcgtgcaggtcggaacttacccgacaaggaatttcgctaccttaggaccgttatagttacggccgccgtttaccggggcttcgatcaagagcttctccttacggataaccccatcaattaaccttccggcaccgggcaggcgtcacaccgtatacgtccactttcgtgtttgcacagtgctgtgtttttaataaacagttgcagccagctggtatcttcgactgatttcagctccatccgcagggacttcacctacatatcagcgtgccttctcccgaagttacggcaccattttgcctagttccttcacccgagttctctcaagcgccttggtattctctacctgaccacctgtgtcggtttggggtacgattcaatgttacctgatgcttagaggcttttcctggaagcagggcatttgttacttcagcaccgtagtgcctcgtcatcacacctcagcgttaaaaggtaccggatttacctggaacctccgcctacatgcttaaaccgggacaaccgtcgcccggctaacatagccttctccgtccccccttcgcagtaacaccaagtacaggaatattaacctgtttcccatcgactacgcctttcggcctcgccttaggggtcgactcaccctgccccgattaacgttggacaggaacccttggtcttccggcgtgcgggcttttcacccgcattatcgttacttatgtcagcattcgcacttctgatacctccagcaaccctcacaggccaccttcgcaggcttacagaacgctcccctacccaacaacacatagtgtcgctgccgcagcttcggtgcacagtttagccccgttacatcttccgcgcaggccgactcgaccagtgagctattacgctttctttaaatgatggctgcttctaagccaacatcctggctgtctgtgccttcccacatcgtttcccacttaactgtgactttgggaccttagctggcggtctgggttgtttccctcttcacgacggacgttagcacccgccgtgtgtctcccgtgataacattcttcggtattcgtagtttgcatcgggttggtaagtcgggatgaccccctagccgaaacagtgctctacccccgaagatgaattcacgaggcgctacctaaatagctttcggggagaaccagctatctcccggtttgattggcctttcacccccagccacaagtcatccgctaatttttcaacattagtcggttcggtcctccagttagtgttacccaaccttcaacctgcccatggctagatcaccgggtttcgggtctataccctgcaacttaacgcccagttaagactcggtttccctgcggctcccctatacggttaaccttgctacagaatataagtcgctgacccattatacaaaaggtacgcagtcacaccataaaggtgctcccactgcttgtacgtacacggtttcaggttctttttcactcccctcgccggggttcttttcgcctttccctcacggtactggttcactatcggtcagtcaggagtatttagccttggaggatggtccccccatattcagacaggataccacgtgtcccgccctactcttcgagttcacagcctgtgcattttggtgtacgggactatcaccctgtaccgtcggactttccagaccgttccactaacacacaagctgattcagactctgggctgctccccgttcgctcgccgctactgggggaatctcggttgatttcttttcctcggggtacttagatgtttcagttcccccggttcgcctcgttaacctatgtattcagttaacgatagtgtgacgaatcacactgggtttccccattcggacatcgccggctgtaacggttcatatcaccttaccgacgcttttcgcagattagcacgtccttcatcgcctctgactgccagggcatccaccgtgtacgcttagtcgcttaacctcacaacccgaagatgtttcacttctgattgcgaaaatttgagagactcgaacacacattaactgtgtgtcgtttcaattttcagcttgatccagatttttaaagagcaaatatctcaaacgtcacccgaagatgagttttgagatatatcggcacgcgtctttcactcacgaaccagcaagtggcgtcccctaggggattcgaacccctgttaccgccgtgaaagggcggtgtcctgggcctctagacgaaggggacactgaagtctcaatcgcaagacgccttgcttctctactttcatcagacaatctgtgtgagcactacaaaggcaggttctttaaggtaaggaggtgatccaaccgcaggttcccctacggttaccttgttacgacttcaccccagtcatgaatcacaaagtggtaagcgccctcccgaaggttaagctacctacttcttttgcaacccactcccatggtgtgacgggcggtgtgtacaaggcccgggaacgtattcaccgtagcattctgatctacgattactagcgattccgacttcatggagtcgagttgcagactccaatccggactacgacatactttatgaggtccgcttgctctcgcgaggtcgcttctctttgtatatgccattgtagcacgtgtgtagccctactcgtaagggccatgatgacttgacgtcatccccaccttcctccagtttatcactggcagtctcctttgagttcccgaccgaatcgctggcaacaaaggataagggttgcgctcgttgcgggacttaacccaacatttcacaacacgagctgacgacagccatgcagcacctgtctcagagttcccgaaggcaccaaagcatctctgctaagttctctggatgtcaagagtaggtaaggttcttcgcgttgcatcgaattaaaccacatgctccaccgcttgtgcgggcccccgtcaattcatttgagttttaaccttgcggccgtactccccaggcggtcgacttaacgcgttagctccggaagccacgcctcaagggcacaacctccaagtcgacatcgtttacggcgtggactaccagggtatctaatcctgtttgctccccacgctttcgcacctgagcgtcagtctttgtccagggggccgccttcgccaccggtattcctccagatctctacgcatttcaccgctacacctggaattctacccccctctacaagactctagcctgccagtttcgaatgcagttcccaggttgagcccggggatttcacatccgacttgacagaccgcctgcgtgcgctttacgcccagtaattccgattaacgcttgcaccctccgtattaccgcggctgctggcacggagttagccggtgcttcttctgcgagtaacgtcaatcgccaaggttattaaccttaacgccttcctcctcgctgaaagtactttacaacccgaaggccttcttcatacacgcggcatggctgcatcaggcttgcgcccattgtgcaatattccccactgctgcctcccgtaggagtctggaccgtgtctcagttccagtgtggctggtcatcctctcagaccagctagggatcgtcgcctaggtgagccattaccccacctactagctaatcccatctgggcacatctgatggcatgaggcccgaaggtcccccactttggtcttgcgacgttatgcggtattagctaccgtttccagtagttatccccctccatcaggcagtttcccagacattactcacccgtccgccgctcgtcacccgagagcaagctctctgtgctaccgctcgacttgcatgtgttaggcctgccgccagcgttcaatctgagccatgatcaaactcttcaatttaagtttgatgctcgtgaattaaacttcgtaatgaattacgtatgttcactcagagacttggtattcatttattgtccgaagacattaagaatccatgtcactttgagtgcccacacagattgtctgataaattgttaaagagcagttgcgacgcgctttagcgctctgtcgcgaggtggcgtatattacgctttcctctttcagagtcaaccctgaatttcagaatttttctcttcaaccgaaccggctgtttgtgtgaagtgattcacatccgccgtgtcgatggaggcgcattatagggagttctcgaacgcctgcaatagaaaaattgcagaaaaatgactgactgctgcattccccagcaaaaccccgctttatacccttttacacacagaattatccacaggagcatggccaaagagggctcaaaccccgctacatccactgccacataaggagagattcatcgactgaaagagaaagataaaaattcgcgagcgttgcgcaaacgttttcgttacaatgccgcgctatgacacggatgcccggttgggtgcgttaggtgagtttttaggcaaaaactcacctaacgctctctgtaatgttcaaatcctggggatttaataccatgcaacaacgtcgtccagtccgccgcgctctgctcagtgtttctgacaaggccggtatcgtcgaattcgcgcaggcgctttccgctcgtggtgtcgagctgctgtccaccggcggcaccgctcgcctgctggcagataaaggcctgccggttaccgaagtctctgactacaccggtttccccgaaatgatggatggacgcgtgaagaccctgcatccgaaagtacacggcggcatcctcggtcgtcgcggtcaggatgacggtatcatgcagcaacacggtatcgcgcctatcgatatggttgtcgttaacctttatccgtttgcccagaccgtcgctcgtgaagggtgttcgctggaagacgcggtggaaaacatcgatatcggcggcccgaccatggtgcgctctgcggcgaagaaccataaagacgtcgccatcgtggttaagagcagcgactacgacgccatcattaatgagatggacgccaacgaaggttccctcacgctggacacccgcttcgacctcgccattaaagccttcgaacacaccgccgcttacgacagcatgatcgctaactacttcggtagcatggttccgtcctatcacggcgaaagcaaagaagccgctggccgcttcccgcgtaccctgaatctgaacttcattaagaagcaggatatgcgctacggcgaaaacagccaccagcaggctgccttctatatagaagagaatgtaaaagaagcctccgtggctaccgccacccagctgcagggcaaagcgctctcctataacaatattgccgataccgatgcggcgctggaatgcgtgaaagagtttaacgagccggcctgcgttatcgttaagcatgccaacccgtgcggcgttgccgtcagcgactcgatcctcgacgcctacgatcgcgcatacaaaaccgacccaacctccgcgttcggcggcatcatcgcctttaaccgcgagctggatgctgaaaccgcgcaggcgatcatctctcgccagttcgtcgaagtgatcatcgcgccatccgctagcgaagaagcgctgaaaatcaccgccgctaagcagaacgtccgcgtactggtctgcggccagtgggatgctcgcgtcgcgggtctcgatttcaaacgtgtcaatggcggcttgctggttcaggaccgcgatctcggtatggtcaccgcgggcgaactgcgcgtggttagcaaacgtcagccgagcgagcaagagctgcgcgatgcgctgttctgctggaaagtggcgaaattcgtcaaatccaacgccatcgtttatgccaaagataatatgaccatcggtataggcgccggtcagatgagccgcgtctactcagcgaaaattgccgggattaaagccggtgacgaaggtctggaagtgaaaggttccgccatggcctctgacgctttcttcccgttccgcgatggtattgatgccgcagccgcagtaggcatcacctgcgttatccaaccgggcggttctatccgcgacgaagaagtaattgccgccgcggacgaacatggtatcgccatgatcttcaccgacatgcgccacttccgccattaattcacggagcagcagatgaaagtattagtaatcggcaacggcgggcgcgaacacgcgctggcctggaaagcggcccagtcgccgctggttgataccgtctatgtcgcgccgggcaatgcgggtaccgcgctggagccggcgctgcaaaacgtcgccatcggcgtcaccgatattccggccctgctacgcttcgcgcaggatgagaaaatcgatctgacgatcgtgggtccggaagcgcctctggtcattggcgtagtagacgcattccgtgccgcagggctcgccatcttcgggccaaccgaaggcgccgcgcagctggaaggttcaaaagccttcaccaaagatttcctcgctcgtcatcatatcccgacggcggaataccagaacttcaccgaagttgagcctgcgctggcttatctgcgggagaaaggcgcgccgatcgtcatcaaagccgacggtctggcggcaggtaaaggcgttatcgtggcgatgacccttgaggaagccgaagcggcggtcaaagatatgctggccggtaacgcctttggcgatgcaggccaccgcatcgtgattgaagagttcctcgacggcgaagaagccagctttattgtcatggtcgacggcgagcacgtcctgccgatggccaccagccaggatcacaagcgcgtcggcaacggcgataccggcccgaacaccggcggtatgggcgcttactccccggcgccggtggttactgatgaagtccatcagcgcaccatggagcgaattatctggccaaccgttaaaggtatggccgctgaaggtaacacctataccggtttcctgtatgccggtctgatgatcgacaagcagggcaatccgaaggttattgagttcaactgtcgctttggcgatccggaaacccagccgatcatgctgcgcatgaaatccgatctggtagagctgtgcctcgccgcctgcgcgggcaagctggacgagaaaacttccgagtgggataaccgcgcttcgctgggcgtcgtggttgccgccggtggctatccgggcagctacaacacgggcgatgagatccacggcctgccgcagcaggaagccgcagacggtaaagtcttccatgccggcaccaaactggcagacgaccagcgcgtggtcaccaacggcgggcgcgtgctgtgcgtgaccgcgctgggtgacaccgtggctcaggcgcagcagcgcgcctatgaactgctgaccgatattcactgggacggcagctttagccgtaacgatatcggctggcgcgccatcgcgcgtgagaaaactaacggctgagttttgccagaagcgttttacgcgtaatgcctaactgacgggcggcttcagttttgttgccgcccgttttttccagcgccgagagaatgacttctttttcaacttccactaatggctgaatcagcgcctcatcgttgccagtgaccggcagcggcgcgcccgctatcgccaacggcagttcacgctcggaaatgtagtctccggtcagcagcaccaccgcccgctccaccgcattttccagttcgcggatattccccggccagtcgtagtgaatcaacaggtccatcgcctgcggcgtaaatccctgcaccgttttgcgattgcgttcggcgtagcgcttaagaaagtgctgcgccagttgcggaatatcttcacgccgctgacgcagcggcggcatatcaatagttacgacattcaggcggtaatagagatcctggcgaaaacgcccggcgctcacctcctccgccagattacgatgggtggcggcgattagccgcacatcgacagaaagcgtctgattactgcccacgcgctgcacttcgcgttcctgaatcgcccgcagcagacgcacctgcatcagcggcgagatatcgccaatttcatcaaggaacagcgtgccgccatccgcctcgacaaaacgcccttcccgccgccgttccgcgccggtaaaagctcctttttcatggccgaacagctcggattccagcagcgactcattgagcgctgcgcagtttagcgtcaccagcggcttgtcgcggcgctcgctgcaggcgtggatggcgcgcgccaccagttctttaccggttcccgattcgccgcagatcagcaccgtcgcgtccgagggcgccaccagcgtaatattgttgataagcgcctgcattgccgggctttcgccaatcatgccccatcgtaaatctgacgaggcgctgagatcgctctcgctctgccgggtgtgcgccagcgcctgaaccagcgtctgctgtagggtgtcaaaatccagtggcttgatcagataatccagcgcgccggacttaatagcctccaccgccgtgccgacgctggagaatgccgtcatgattaataccggaatcgccgggttataggctttgatctcttttaatgtcgcgataccgtccatctccgccatgcggatatcgcacagcaccagatcgaagacctgctgatggatctgctccagcgcctgcaggccgttgtgggctaacgccacttgatagccccagccacgcagtagcgcctgcagaatcgtgcagtggctgacgtcatcatcgacaaccagaatctgtactttatcgctgctcatcttccctccgttgagcatccactggtagccaaagcgtaaatatcgctccggctcccggctgactttcggcgcggatcgtcccgccatgttgttcgataatattctgtaccaccgccagccccagccctgtgccgtccgccttggtggtgaaataaggagtgaagatggcctgcagctcttcatcgctcatccccttaccgctatccttgacgacaattttcacacgttgccgatcggcttcgcttgccgatacgtgaatgacgccgtcgcggccaatagcctgcatcgcattcagatacagattcaacagcacctggttcagacggtcggggtcggctttaatcgaggttaattcagggcgcggagtaaattgcagttcgatcccgcgactctgcgcatcctggcttaccagctgcaatgagtgatggataagcgcgttaatatcgaccgactggtagtttaaatgggcagggcgaaccagctccagcagttcactgacgacccggttcaggcggtcggcctctttcgccatcaccagcgctaactcctgcgcctcgccgcccggcggcgtacgctcggcaaaatactttgccagtcctttaatcgaagagagcgggttgcggatctcatgcgcgacgccagccgccagatgcccaagggccatcagtttttctttgcgggccatcgcctcctgtagctgctgacgtgaacgacggtaacggcggaaccagaactgagcgaggatcgtcgcgacgatgaccagcgccgcggccaccaacatgatcatcatgttacgcaagccgcgagcctgcgccgcatccagctcacggctatcaaaggcgataaaaatcacctgtggaacattgggctgagccagcgcgctattgcagcgcttcatcattcccatatggtgaccacgagcagggttgagcgggcggaactggcgataaatctccagcgccggttgcggctcggcaagccggcgccagcgctcctgttcgcccaccttgagttcacgcatttgcgcaggactgtacagcgcggtatccacctgttgcgggtcgctgtgggcgataatcttaccgttttcatcggtcaccgcgaaccacagcactccgggctgccatgccatctcctccagcaacgcctgcagctgcgcgtgatgcattcgcatccccatgccgacacgcgtgccggactccagggcgcggatcagcacactccccttttcttcgatgttttgccgggcggcggcggtctcccgaccataatcgcggacgatcatcgcggaaaacagaagaactaacaggacgaccgtgccggtcagtaaccagctcagggcgtcccggaagcatgaagtaatgcgcagcatgggcgggtccttatcgtgtccttattcgctatcgaaggatccatcagcagaaatcatgccatttttccataccgtgaaacctgtcctcagacatatcgtcggtgatttagcgagtaaaaatgactcgctgtcgccagacgcaacgggtcatttttactcgccagagtcacgtgtgccgcggaccagccggtattgacgcgctttttcaggctggcatggaagatgcaataccgagggaaaccacacaggagatcacgctatgaaacggaaaccgactttatccctcgtcctcgtggcgcttgccgctctgacctttggcagtcacgcggcctgggccggacatcactggggctacaataacgggatgggcgcgcagggttacagccagctcacccaggaacagcaagcgaccgtgcagaagctacatgacaattactatgcgcaaaccagcgccctgcgccagcagttacagtccaaacgctacgagtacaatgcgctgcttactgcgccaaaaccagaaagcggaaaaattgaagccgtggcgaaggaaatggaaacattaagccagcagctggatcagcagcgggtaaaacttgatatcgccctggctgaagcaggcgttcctcgcggcgcgggtatgggttacggcggctgccgcggtaatggcggtggtcatatgggcatgaaccactggtaaaactcagaacgatttttcgctcggctgccaggtacagaagttttcgttagccaccagcagcagctgagcgccttccggtgcttccagccacgccacgctcacttctacggaagagtgattctggcggcgttcaatatgcgctaatgcccgctcatcaaggtcaggcttcacggtctggccttcacaggtagtcacggtacgatcggcatgccagcgcccctggcgtaaaactacccgtccctgacgcaatgcatcgctggtttcacggatttgctgtgcgcggtagcggtacagcgcaacctggtcgctggaaagctgctgcttctgcccgtcgacttcccgctgcataaagctcagctcgccctgggcgtcaaagcgggcgcgaatatgttccggcggtttaccgtatacattgagttcaataagcgttagttggccatcctgccagcggtactcgctggttgaggtgtcgccgcggtgccatggactaaaagcggcaagcaggtgaacttcatcgccggcatctttgcgccagatgcgcatggcgccctggttatcggcgtagccgctggcggtgaaaggaggaagagaagaatcgtgactgcaggcagtgagcaatagcgcgcctgccagcgtcagcgtgcgacgccagttagacaaaaggggcttaaaagccccttcgttaaaactggacactgccacgcggtcttacttgactgcgtctttcagcgctttgccagaaacaaatgctggcacgttagctgcagcgattttgatttctttaccggtctgcgggttgcggccagtacgctcagcacggtggttcactttgaaggtaccgaaaccaaccagttgaacagcatcaccttctttcagagactcggtaattgcagccagggtggattccagggcagcttttgcctgtgctttagacaggtcagctttgtccgcaattacatcaatcagttgagtcttgttcataagttatccttacaatgtgtttatcgcttgctaagcatcgagtgcgacggaaatgccagaaaagcactctcctgcatacacgcaccgatagccactttttttcgccccccaaatgtagaccagacagggggcggaatggaagtcttcagacgctacaattcaggcggtaaatcacgttttctggtctcattgctgaaaatttataccaatattgctctcgccggcctctcgcaggtctgcacgcagccctttaatcagttcaatatcgcgttcttcgcagtcggccaacaggcggaaaatctcccactgaatgtcccattcttgttcaaccgccgggttggctctgagctcttcatcggtcatttcgcgaccttcctgagtcatttccagcatcgcgacggtagtaatggaagtcttactgacctcgatagcatgttccagcgtttcaccgctcaggcgtgagtggattaattcgctcagcgcgacgcaggcatcgatagccggatagacgccgtacatgtcgtagtcatccgcggacggaatcgcctcttccagcttttccagctgactatcgaaattcaccttcgcatcttttaccgtcagcgtttcccagatcaggtcaaggatacgacgatataactggccgtcgccaaactcggtttgcttgcagaacatggcgtagttggggtacatacgctcgcacaggcaggccataaaggtgacgtgctgccagctctccagtttctccaggcgcaggtgaatcgggttttgtaacatgatgaattctcgaagtcagaaattaggcgcagtgtacctgaatcagccgtgatttgctcgccaacgcacaaaggaaggccgacgggacgcgacggcatcggcccagcgcgtcggctcgggtagacgatagccctgcatacaacgttccacccacattaacgcgctatcgatacccacgcggtggccggtactgataaacagcgggttgcagcgtgctttgctgcgccagacccaggccagctgatcgcctttgtcgattaatggcgccagcgcgccgggctcggcgccaagcggttcaaacttgccgcataaacgttttttcgctacgccaatcgttggcacatcaaccatcaggccaaaatggctggcgacgccaagccgccggggatgtgaaataccgtgcccgtcgacgaacaacagatcgggcttttgcgataactgttgccacgccgccagcagcgcgggggtctcgcgaaaggagaggaagccggggatgtacggcatcgtggtggcgacgcgcgccacctgatactccaccagctcaagccccggataagttagcagcaccatcgcagcgcgggtaatttccccctcctgctcaaaccccacatcggcgccgccgatcagcaccggcgggtcgcgatccaatcggtccgcacgttctaccgacgcggctaaagattgctgttgggtccgtagcgcagctaaatccatcatgcttatctcctattggtgatattgcgcggagagacgatgcaccgcctcaacaaagactcctgcatgctgtgggtcgacgtcctgatggatgccgtggccaaggttaaatacatggccttcgccctggccgaagccggcgagaatgttcgccacttcgtcttcaatgcgggcggcaggggcataaagcatcgacgggtccatattgccctgcagcgccactttgtggcctacgcgacggcgagcatcggcaatatcggtggtccagtcgagacccagcgcatcgcagccggtctccgccatcgcttccagccattgtccgccgcctttggtgaacagcgttaccggtacgcgacggccttcgttttcccgcagcaggccatcgacgattttatgcatgtaatagagcgagaactgctgatagtcgcggccggtcaacacgccgccccaggtgtcgaaaatcatcaccgactgcgcgcctgctttgatctgcgcgttcagatacagggtgacacttttcgccagcttatccagcagcgcgtgcagcgcctgcggttcggcgtacatcatctttttgatgacggtaaaggctttgctgctgccgccttcgaccatataggtcgccagcgtccacgggctgccggaaaaaccaatcagcggtacttcgcctttcagttcacggcgaatggtgcgcacggcgttcatcacgtagcctaattcttgttccgggtccggcaccggcagtttgtcgacgtcggctttgcatttcaccggcgaggtgaagcgcgggccttcgccagcttcaaagtacagccccagccccatcgcatccggaatcgtcaggatgtccgaaaagaggatcgccgcatccagcgagtaacggcgcagcggctgtagcgttacttcgcaggccagctcggcatttttacacagcgacatgaaatcgcccgcttgcgcgcgggtggctttgtattccggaagatagcggcccgcctggcgcatcatccacaccggggtgacatcaaccggctggcgcagcagcgcgcgcaggtaacgatcgtttttcagttcggtcatttttacattcctttagcgttgatgcgcccagtgtaacatgtcactcgtactctgcccgacacatcgccaccgtatcttcgatcaggcgtcgcgccaccgtgcccggcggcggcagtagcggcaaatcgtcatagcgataccactctgcgctcagcagttctttcttatccacgacaatatcgccgctatcgtattcagccataaaggcggtcatcaatgattgcgggaagggccacggctgggaggtcacatagcgcaggtttttcaccttaataccgctctcttccatcacttcgcgggcgaccgcctgctcaagggtttcacccacttcgacaaacccggccaacaccgtatggacaccattacgatggcgggtatgctgcgccagaagaattgaatcgtcgcgacgaatggcgacgataatgcagggggcaatttgcggataatagcgctcgcggcagtggccgcacagcatcgcccactcggttttactgacatgcatcgggtgaccgcagtagccgcagaatttatgcgatcgataaaactcggccaactggatcccgcgccctgctaactggaaaagcccaggctcctgatccaatatctggcgcagcgatcccatatcacggcgacgatcctgacgcaccagccacaccgcttcgccttgccactcgccgagatgtagcgcgcgttcaccgacaagatcaaaatttaccgcttcaccatgtggtaattcccctgcgggaagccataatttttgttcgtgactgacgatccaccagccgcgatctaatttttcaataatacgatccatatctattgcgctaccttcgttttactggcacttttaacattatatttacatttgctgagcaacgttatttttaatcttgcggagtcaatcatgttaaaccagctggaaaacctgacggaacgtgttggaggcaataacaaactggtcgatcgctggctgcttgtgcgtaagcatttgctcgtggcttactacaacctggttggcctgaaacccggcaaagagtcctttatgcggcttaatgaaaaggcgctggatgacttttgccaaagcctggtggattacctctcatccggtcattttaatatttatgaacgtattatcggagaaatggaagggagtacccctcttttagccgccaccaaaatctacccgcagctggaagccaatacccagcagatgatggactattacgatacctgcctcgaaaacgccatcgatcatgataactatctcgaatttcagcaggcgctgtcagatatcggcgaatcgctggaggcgcgcttcgcgcttgaggacaagctgctggcgctggtcgtcgctcacgatcagaaagacaacgttggcgacaatatcgcgccgaccgcttgagttgtgaaccgttaacgagtaatttacatacattatccctctgcggagggatttcatcttgtcggagtgcctattttccacgcgaacgctgaagtggaaaaggctgagaccgtttattcgggatccgcggaacctgatcaggctaatacctgcgaagggaacaagagtaaactgctggtcgcacctgcccgttccgggctggtcgcatctgttactccatccgtcgtctgacaagccatctccttttttgtaactggaatgcgctatgtctactaccaaactgacccgccgggaacaacgcgaacacgcgcagcgattcattgatacgctggaaggtaccgcttttcctaattctcgccgcatttacattcaaggctcacaggctgatatccgtgtcccgatgcgtgaaattcagctcagcccgacgctcatcggcggtgataacgataacccccagtacgaagccaacgaaccgataccggtgtacgacacctccgggccatacggcgacccggagatcaacatcgatgtccgccaggggctggcaaaactacgccaaccgtggatcgacgcgcgtaacgactgcgcgccgctcaacgaacgcagctcggcttacactaaagcgcggctggccgacgatggccttgatgaactgcgcttcggcggcctgctgacgcctaaacgcgccgtcgctggcaaatgcgtgacgcaactacactatgcccgccaggggatcgtcaccccggagatggaattcatcgccattcgcgaaaacatgggtcgcgagcatatccgcagcgaggtgctgcgccagcagcatgccggagaaagctttggcgcccgcctgccggacaacattaccgccgagttcgtccgcgatgaagtcgctgccgggcgagccatcatcccggccaatatcaaccacccggaatccgagccgatgattatcggccgcaacttcctggtgaaagtgaatgccaatatcggcaactcggcggtgacctcttccattgaagaagaggtcgagaagctggtctggtcaacccgctggggcgccgacacggtaatggacctctccaccggccgctatatccacgagacccgcgaatggatcctgcgcaacagcccggtgccgattggtaccgtcccgatttaccaggcgctggagaaggtcaacggcattgccgagaacctgacctgggaagccttccgcgataccctgctggaacaggccgaacagggcgtcgactacttcacgattcacgccggggtgctgctgcgttacgtgccgatgaccgcgaagcggctgaccgggatcgtctcgcgcggcggttccatcatggccaagtggtgcctgtcgcatcatcaggaaaacttcctctaccagcacttccgagaaatctgtgaaatctgcgccgcctatgacgtgtcgctgtccctcggcgatggtctgcgccccggctcgattcaggatgccaacgacgaggcgcagttcgccgagctgcatacgctgggcgagctgactaaaatcgcctgggagtatgacgttcaggtgatgattgaaggccccggccacgtgccgatgcagatgattcgccgcaatatgaccgaagagctggagcactgccacgaagcgccgttctacacgctggggccgctcaccaccgacatcgcgccgggctatgatcatttcacttccggtatcggcgcggcaatgattggctggtttggctgcgccatgctgtgctacgtcacgccaaaagaacatctcggcttgcccaacaaagaggatgtaaaacaggggctgattacctacaaaatcgccgcccacggcgccgacctcgctaaaggccacccgggggcgcagatccgcgacaacgcgatgtcaaaagcacgtttcgaattccgctgggaagaccagttcaacctcgcgctcgatccctttaccgcgcgggcctatcacgatgaaaccctgccgcaggagtccggcaaagtcgcccacttctgctccatgtgcgggccgaaattctgttcgatgaagatcacgcaggaggtccgtgactacgccgcaaagcaaaatatcgaagccggcatggccgatatgtcgaataacttccgcgcccgcggcggtgaaatctacctgaaaaaggaaaatgcctgatgtaccagcctgactttccgcccgtaccgtttcgtctcgggctttatccggttgtcgatagcgtggcgtggattgagcgcctgctggaagccggcgtacgcactattcaattgcggatcaaggaccagcgcgacagcgaggtagaggatgatgttatcgccgccatcgcgcttggccgccgctatcgcgcgcgtctgtttatcaatgattactggcaactggcgattaagcaccgggcgtatggcgtacatctgggtcaagaggacctggaaaccaccgacctgagcgccatccgtaaagccggactgcgccttggcgtctccactcacgacgacatggaaattgacgtcgcgctggcggcgcgcccttcctacatcgcactgggacacgtcttcccgacgcaaaccaaacagatgccttcggcgccgcagggcctcgaacagcttgccgggcatattcagcggctggccgattatccgacggttgcgataggcggcatcagtctggaaaaagcaccgggcgtactggccaccggcgttggcagcatcgcggtcgtcagcgccattacccaggctgctgactggcgggctgccactgcacaactgttaacgctggcgggagcaggcgatgaatgatcacgatttcatgcgctatagccgccagctgctgctggaagatatcgccatcgaggggcagcagaaactgttagccagccgggcgctgattattggcctgggcggcttaggttcgccggcggcgctatatctggcgggggccggcgtcgggacgctgacgctggccgatgacgacgcggtgcatctcagcaacctgcagcggcaaattctgttcaccagcgacgatatcgaccagccaaaagccgcggcggcaaagacgcggctcaaccaactcaatccgcaaatccgcctcgtggcgctacagcagcgtttaagcggcgaggcgctgcgcgctgaagtggcgaaagccgacgtggtgctggactgtaccgataacatgatcgcccgccaggcgattaacgccgcctgcgtcgcccttgagacgccgctggtgaccgccagtgccgtcggcttcggcggccagttgatggtgctgacgccgccctgggcgcaaggctgctatcgctgcctgtggccggacaccgccgaaccgcaacgtaactgccgcaccgcggggatcgtcggtccggtcgtcggcatgatggggacgctgcaggcgctggaggccataaagctccttagcggcatggcgacgccgcgcaacacgctacggctgtttgacgcccgcaccagcaactggcgcaacctcgcgctgcaaaaggcccagggctgcccggtatgcggaggccatgatgcaagtctggtttaacgacgaaccgctggagtgcgctgacaacctcagcgtaagcgccctgcttagccaactggagcagctccagcccggcgttgcgctggcgctcaatcaacacatcctgccacgcgaacggtgggaagatcatctcttgcaggaaggcgatcgggtcctgctttttcaggttatcgccggaggctgacatgttacgtattgctgataagacatttgaatcccacctttttaccggaaccggcaaattcgctgccccggaggtgatggtcgaggcgattcgcgcctcgggaagccagctggtgacgctggcgatgaagcgcgtcgatttacgccagaacaatgacgcgattctcgcgccgctgctggcggcgggcgttaacctgctgccgaatacctcaggcgccaagacggcggaagaagcggtatttgccgctcgcctggcgcgggaagccttaggcacccactggttgaaactggagatccatccggacgcccgctggctgctgcctgaccccattgaaaccctgaaggcggcggaattgctggtgcgcgaagggtttgtcgtcctgccctattgcggcgccgacccggtcctgtgcaaacggctggaagaagctggctgcgcggcggtgatgccgttgggcgcaccgataggctccaaccaggggctggaaaccaaagccatgctggagattattatcgaacaggcgacggtaccggtggtggttgatgccgggatcggcgtgccgagccacgcggcgcaggcgctggagatgggcgctgatgcggtgctggtcaacaccgccattgccgtcgccgacgatcctgtcgccatggctcgcgccttccgcatggcggtcgatgccggattgctggcgcgtcaggccggaccgggaacgcgcagtactcaggcgcaggccaccagcccgctgaccggctttctggaggcgctggcatgaaaacttttagcgatcgctggcggcagctggagtgggatgacatccgcctgcgcatcaacagcaaaaccgccgccgacgtcgaacgagcgctggcggcaaagcagctcacccgcgatgacatgatggctctgctctctcctgccgcggccgattaccttgaaccgctggcccagcgcgctcagcgcctcacccggcagcgcttcggcaacaccgtcagcttttacgtaccgttgtatttgtccaacctgtgcgccaacgactgtacctactgcggcttctcaatgagtaatcgcattaagcgcaagacgctggatgaagcagagattgcccgcgaatgcgccgcaatccgcgatttaggctttgagcatttgttactggtcaccggcgaacatcagagtaaggtcggaatggattatttccgccagcatctgccatccatccgccgccagtttgcctcgctgcatatggaagtgcagccgctggcgaccgaagagtatgccgaactaaaaacgctggggcttgatggggtaatggtctaccaggagacctaccatgaaggcatgtatgcccagcaccacttgaaaggtaaaaagcaggatttcttctggcgccttgatacgccggatcgtctgggcgaagcggggatcgacaagatcggcctcggcgcgctcattggtctttccgacagctggcgggtggactgctttatggtcgccgaacatctgctgtggctacagcagcactactggcgcagccgttactctatctccttcccgcgtttacgcccttgtgccggagggattgcgccagcctcgctgatggacgaacgtcagctggtgcagaccatttgcgccttccgcctgctggcgccggaggttgagctgtcgctctcgacccgtgaatcaccgtggttccgcgaccgggtgatcccgctggcgattaacaacgtcagcgcgttctccaaaacccagcccggcggctacgccgacgatcatccggagcttgagcaatttgcgccacacgacgatcgccgccctgaagaggtcgccagcgcgctggccgcccgtggcctgcagccggtatggaaagactgggatagctggctgggacgcgcctcgcaatcatcatgaagcatgctgcaagcagctgattattttgcgtgcctgcacgagagatgaaaaacggaggctcgccgaactgccgccgtttttctattctgccctggtcagcagcggacgctgaccagggcgagcttttctttcctctcttcgccctgcctctaccgtccgcactgccgcaaacatattgctattaaatattaatcacgatgatgagcgcactcagcgttataatttagcgatagttacctgattcgctaagcaggcatgctggcttaacctgcgtctaaacccacggtttataccctaaataattcgagttgcaggacaaaacggctagccgttttgaacagcgcttgcgctggccccgtaggggcgaggctgaaggccgagtcacgcggcgacgcagcgaatccccagaagcttacttcagtaagtgactggggtgagcgaggaaagccaacgcacatgcaacttgaagtatgacgggtatattgattctggacgattaacaactcatggcacgccacaacagaaagctctcttttactacgccaatcgtagtggggtttgcagggattttgctcagttttttactgatcgcaatctttgttaccgcgacgcagaagaaaaactttcttgaagattatcaccatattaatcgcaactttacccataaccttgcggtgaactacaccgaatcgctgctgcgcgaaaatgactacattctggcgcgcgcgacgaaatactttgcccgcgacgatgcgctcaatagcgccgtaaatctcaatccgcaaaagggtctggacgatttgatgcgtctgcaggagctgatgccgacggtctcctccatttcgcttgccgatactcttggtcattatctgcgcgcccccgaagtgatggaaggcgatgagagccgcacgtttgatccaaaaacgcgcccctggtttattcgccaggcggaagccagtaccttcagcctctataccactccttaccttgactacttcacccaccaccctaccgttaccgtctaccggcctgtcatttcaccgcagggaaggctcaaaggtagtctggcatttcatatggatctgacctctatgggctacgcgttacggcagattgtctcgccggtacagggcgagttttttgtcgtgcaacgcgacggcaaagtggttatccatcccgataccggcgcgctatttaaaacctacgttagcgcggaactgatggacaaaatgaccagcgcggaaggccaactttatgatgaggaacataaggcctggtactactactattcctttaccaaccctgactggttcgttattttccgcgtcaccgatgccacccttgatgacctgacgcgctatgaaaccgatattgtcgcctgggggttcgccctcgccgccattgtcatcgtcctgttcgggctgtatctgcgccacgcttcgcgtaccgtactgatgaacatcattaacgccattaagaccggcgacgtcaaacgcgcgccgcggctggaagccatgctcagcaaagcgatcgagagcaataaacagcgtgagctcacctatgtccgccaggccaccatcgatgcgctaaccggctgcaaaaatcgccgcgccttcgacagcgatatcgccgccctgatgaacgatcaccagcctttcgccctcgcgttggtcgatatcgacaacttcaaatcaattaatgatacctggggccacctcaatggcgacatcgtgctgcgcaacgtcgcgcgtgaagggatacagatcctgcagccgcaggagatctcgctttaccgctacggcggcgaagagtttgccgttatcttccctgccgaacatatcgacaacgcgctcaccattctggagagctggcgccttaacgttgccagccgaacctggcgcgaagaaggattaaccgtcacctttagtgccggcctcggggaatggaatatggagccgctggaaaaactggtcgttagcgtggatgaagcgttgtataaggccaaacagcagggcaagaatcgaatcgttcacgcctgagcacaactccctgatagcccgcttttgcgggcttttttatctcggccgctgcaaaaatgaaaccggtttcattttttgtgatgttttacacacaatcatggtgaagcggttgtgccgcgccgccgcccgcgataaagatgatgcatcaaggaacatacataagggcgatgaaactatgaagaatatcgttttatgctgtgccgcaggaatgtccaccagcatgctggtgcaacgcatgaaagaggccgcgcaaaagaaaggcatcgaagtctcgatcaaagctgtgccggtagcggagttcaaagataacctggccgcggcggatattatcctgctcggcccacaggtgaagtacgagcaggcgaaactacaggcgctagccgacccggtcggtaaaaaggtcgccgttattgacatgatggattacggcatgatgaaaggcgatgccgttctggataaagccctgaagctgatggagtaaggcatggaagatttagagacgattatcatggagctgctggtcaacgccggctccgcacgcagttctgccctcaccgccctgcagcaggcgcgtaaaggcgatttcgccgccgccgaacaggctatggccgactcccacgaattcgtgaagcatgcgcataaaatccagacccagcttattggcctggacgaaggcagcggcaagctgccggtgaacctgattaccgtgcatgcccaggatcatctaatgaacgcgatggtgattcaggatttagcaaccgatatgatcgaactgtatcgccgcctgccgcccgcacaataatcccgctgatttatcaggcgccgccagcggcgcctgtctcaattacagaaaaccgtacatcgccgcgaacacccagccaaagacgcaagaaacgctcacgccaattaatcccggcaggataaagctatggtttatgacgaagcggccaatatgggtcgtgcctgaacggtcaaactgaatcgccgccagatcgcttgggtaagtcggcaggatgtaatagccgtagcaggcgggcgcggaagcgacgatataggccgggtcaacgccgatcgccagcgccaccgggacaatcgccgccagcgccgccgcctgagagttgacgaacttcgataccaataacagcacgatagcgtaggcccacgggtactccttcaccatctctccgagcacgcctttaatctcggtcatgtgcgcgccaaacatggtttccgccatccatgcgataccgtacaccgcgacgatagcgatcatccccgagcggaaaacctcattttttgaaatcgacgccgggttagttttggtaatgatgatgataagcgccccggagagcagcatgaacatctggatcaccagtaccattgagagaggcttaccatcgaacgccgggcgcagttcggaaaacgcgccaagcagcgccactacggcgattgaggcaaggaagatccacatcgcgatccagttgctggtcggcagctttttatccaatagcgtggccgtatcgccataaacataatgacggttttccggtactgcaataaacgcctggaaggtctcgtctttatcaaggtccttaccgcggaaccagctgaagatgccaatcgccaaaatccccagtagcgttgacggaatggttatcgccagtagatcgagaaactcaaggtgcttaccgttaaaggtaaaattcccgagcatcgccaccagcgagaccaccgccaccgaaaccggactggcaatgatccccatctgagcgccaatcgagctcgccgccatcggccgctccgggcgaatattatttttgatagctacgtcgtaaataattggcaggatcgtatacaccacgtggccggtaccgcacaggatcgtcagcgtacaggtgacgaatggcgcaacgatagaaacgtatttggggttgcgccgcaggagcttctcggcaatctgcagcatcacgtctaaaccgccggatgcctgtagcgtcgccgaggcggccaccaccgcgataatcaccagcatgacatcaaccggcggttttcctggtttaagatgaaagacaaaaactaagataactaagccaatgccgcctaaaaggccgagcgcaatgccaccctttttcgcgccgtagaacagacaaattaagataatgatgagctgtatagcaaattccatgcatcccccagaagctatccattaataacgacaatactctccgccttatttttattttgctcacctcctccattgccttttaacaggcgcagtgaacccctcagttgcggtaaaccgaaaaggatggggaaaagtaatcacatgattctttgagtgttttgactatatagcgtttgcggcgcctattttttgatacatgtagaatttttatccatcgattagtgatggcataaagaaatagcaaatagataattatcagacatgtttaatttgctaattaattgcggcaattacattaaataaatgtaatttattttaggtgagataaatcgacaggtaataaaaaagccagtcaggaaacctgactggcttttaagcgcttagcgaatcaacgattaatcgttgtcagaaccgcccaggcctgcgttcagcagttctgccaggttggcagaggcttcttctacgctcacctgcggcgcagccggctgttcgcccgctgcgcgacggcgcatacgatcctggtggtacgcataaccggtacctgccgggatcagacgacccacgatgacgttctctttcagaccgcgcagttcgtcgcgtttgcccgcaacggctgcttcggtcagcacgcgagtggtctcctggaacgatgccgcggagatgaaggactcggttgccagagacgctttggtgatacccagcaggtcgcgggaataggttgccgcaactttgccattcgcttcaagctcgcggttagcgatcttaacgcgggagtattcaacctgctcaccttcgaggaagtcggagctaccagcactttcgatggtcgctttacgcagcatctgacgaacgataacctcaatgtgcttatcgttaatcttaacgccttgcagacgataaacgtcctgcacttcgttggtgatgtaacgcgttaccgcgtgtacgccacgaagacgcagaatgtcgtgcggcgcttccggaccgtcggaaaccacgtcaccacgttctacacgttcaccttcgaacacgttcagctgacgccatttcggaatcatctcttcgtacggttcgctaccgtctaccggggtgataaccagacgacgtttccctttggtttctttaccgaaggaaatgatgccgctgatttcagccaggattgccggctctttcggacgacgtgcttcgaacaggtccgcaacgcgcggcagaccaccggtgatatccttggtaccgccagattcctgcggaacacgcgccagggtgtcaccagagctgatctgtacgccatcttccagctgaacaatcgctttacccggcaggaagtactgagcaggcatatcggtgcctgggatcagaacgtcgttgccctgagcatcaacaattttcagcgccggacgcagatctttaccaccggaggtacgttccgcggaatccagaaccaccagcgaagacagaccggtcagctcgtcggtctgacgagtaatggtctggccgtcgatcatgtcagtgaagcggacgaaaccactcacttcggtgataaccggcatggtatgcggatcccagtttgcaacggtttcaccgccagcaacctgttcgccgtcgcctttagccataacggagccgtaaggcactttatagctttctttggtacgaccgaattcgtcgatcagcttcagttcggtgttacgcgaggtgataaccagtttaccgctggagttcacaaccgacttcgcattgctcagacggatgctacctttgtttttcacctggatgctggattcagcagccgcacgagatgccgcaccaccgatgtggaacgtacgcatcgtcagctgtgtacccggctcaccgatggactgtgccgcgataacgccgatagcctcacctttgttgatgaggtggccacgcgccaggtcacgaccgtagcagtgcgcacatacaccaaagtcggtgtcacaggatacaacggaacgaactttgacggagtcaacggagttctcttccagcaggtcacaccagtgctcgtgcagcagcgtgttgcgtggaaccagaatgtccgcggtacccggcttcagaacgtcttcagcagtcacacgacccaatacgcgatcgcgcagcggctctttaacgtcgccaccttcgataaccggcgtcatggtgatgccttccagggtgccacaatcgtcttcagtgacaaccaggtcctgcgcaacgtcaaccagacgacgagtcaggtaaccggagttcgcagtcttcagtgcggtatccgccagacctttacgagcaccgtgggtggagatgaagtactggagtacgttcagaccttcacggaagttcgcggtgatcggcgtttcgatgatggagccatccggcttcgccatcagaccacgcataccagccagctgacgaatctgtgccgcagaaccacgcgcaccggagtcggccatcatgtagatgctgttgaaggaaacctgctgctcttcctgaccgtcacggttaatcacggtttcggtttgcaggttatccatcatcgctttggatacacgatcgttcgccgcagcccagatatcgataactttgttgtagcgttcgcccgcagtaaccagaccagactggaactgttcctgaatctcagcaacttccgcttccgcttcgctgatgatttcgtattttttctccgggatgaccatgtcatcgataccaacggacgcacctgaacgcgctgcataagcaaagccggtgtacatcgtctggtccgcaaaaataacggtcggtttcagacccagaatacggtaacaggtgttcagcatcttagagatcgctttcttaccgagcgcctggttcacgatagagaacggcagacctttcggcacgatcatccacagaatggcacggccgatggtcgtgtctttcaggctggtcttcgcgacgaattcaccattgtcgtctttttcgtattcggtgatacgcactttaacgcgcgcatgcagagaggccagaccggcgcgataaatacgctccgcttctttcgggccagtcagcaccatgccttcgcctttggcgttaacacagtcacgggtcatgtagtacagacccagtacaacgtcctgagacggaacgatgattggttcgccgttcgccggggacaggatgttgttggtagacatcatcagcgcacgcgcttccagctgggcttccagcgtcagcggtacgtgaacagccatctggtcaccatcgaagtcggcgttatatgccgcacaaaccagcgggtgcagctgaatggctttaccttcgatcagaaccggttcgaacgcctggatacccaaacggtgcagtgttggcgcacggttcagcagtaccgggtgttcgcggataacttcgtccaggatatcccaaacgacagcttcttcgcgctcaaccattttcttagcggctttgatggtggtggccaggccacgcagttccagcttgccgtagatgaacggtttgaacagctccagcgccattttcttcggcagaccgcactgatgcagacgcaggtatggacctacggtgattacagaacgaccggagtagtcaacacgcttaccgagcaggttctgacggaaacgaccctgtttacctttgatcatatcggccaaagatttcagaggacgtttgttggaaccggtgatcgcacgaccgcgacgaccgttatccagcagggcgtcgaccgcttcctgcagcatacgtttttcgttgcgtacgatgatgtccggcgcagccagatccagcagacgtttcagacggttgttacggttaatgacgcgacgatacagatcgttcaggtcagaagtcgcaaaacgaccgccatccagcggaaccagcggacgcagatctggcggcagaaccggcagaacggtcaggatcatccactccggcttgttgccagactgaacgaaggcttccagcagcttaatgcgcttggtcagctttttacgcttggtttcggagttggtttcgttcagctcttcacgcagctgctcgcactcttgctccaggtccatgcttttcagcagggcctgaatagcttcggcgcccatcttcgcgtcgaattcgtcaccgaactcttccagcgcgtccaggtactgctcttcagtcagaatctggttgcgttcgaggttggtcatgcctccttcgataacaacataagattcaaagtacagtacgcgttcgatatcacgcagcggcatatccagcagcagaccgatacgggacggcagagacttcaggaaccagatgtgggcagtcggagacgccagctcgatgtggcccatgcgctcacgacgcactttggtctgggtcacttcaacgccgcacttctcacagataacaccacggtgtttcaggcgcttgtacttaccgcacaggcactcatagtcttttactggcccgaaaatacgagcgcagaacagaccgtcacgttctggcttgaacgtacggtagttaatggtttccggctttttaacttcaccgaaagaccatgaacggatcatgtctggcgatgccagagcaattttgatcgcatcaaactcttcggttttagtttgcgctttcagaaactttaataagtctttcacggatttgctcccgtcggagttagcacaatctggcgccgggttttaccccggcaccagtgacctgtttgagcgagagttactcgtcttccagttcgatgttgatgcccagcgagcggatttctttcaacagtacgttgaaggattccggcatgcccggttccatctggtggttgccgtccacgatgtttttatacatcttggtacgaccgttcacgtcatcagacttaacggtgagcatttcctgcagggtgtaggccgcgccgtatgcttccagcgcccacacttccatctcaccgaagcgctgaccaccgaactgcgccttaccacccagcggctgctgagtaaccaggctgtaagaaccggtggaacgagcgtgcattttgtcgtcgaccaggtggttcagtttcagcatgtacatgtaacctacggttaccggacgttcgaactgttcaccggtgcggccgtcaaacagagtgatctgaccggaagtcggcagatcgcccagctgcagcagctctttgatttcagcttctttcgcaccgtcgaataccggcgttgcgatcggcatgcctttacgcaggttttcagccagacgcagaacttcttcatcgctgaaggtattcaggtcaactttctggcgaacgtcagcgcccagatcgtaagcacgctggatgaattcgcgcagtttcgcgacttcttgctgctgtttcagcatggcgttgatcttatcgccgatgcctttcgcagccatacccaggtgagtttccaggatctgaccgatgttcatacgagacggtacgcccagcgggttcagtacgatatctaccggcgtaccgttagcatcgtgcggcatatcttcgatcgggttgatcttagagataacacccttgttaccgtgacgacctgccatcttatcaccaggctggatacggcgtttaacggccaggtataccttaacaatcttcagcacgcccggtgccagatcgtcgccttgggtgattttacggcgtttcgcttcgagttttttctcgaactcgtgtttcagttcgtcatactgctcagccagttgctccagctgattttgtttctcttcgtcggtcaggcccagttccagccagcgatcgcgaggcagtttgtcgagcttgtcagcttcaacgccaccggcaaccagcacagcgtaaatacggctgaacagaccagcttcgaggatctgcagttcttcagacaggtcttttttagcctgcttcagctgcatctcttcgatttcaagcgcacgcttgtctttttctacgccgtcacgggtaaagacctgaacgtcgataacggtaccagagacaccgttcggtacgcgcagagaagagtctttaacgtcagacgctttctcaccgaagatcgcgcgcagcagtttctcttccggagtcagctgggtttcacctttcggcgttaccttaccaaccagaatgtcgccgccggtcacttccgcaccgatataaacgataccggattcatccagtttcgagagcgcagcttcacccacgttcgggatgtcagcggtgatctcttccggccccagcttggtgtcacgggacacgcacgccagttcctgaatgtggatggtggtgaaacggtcttcctggacaacacgctcggatacgaggatggagtcttcgaagttgtagccgttccacggcatgaacgctacgcgcatgttctgacccagcgccagttcaccgaggtcggtggacgggccgtcggccaggacgtcgccgcgttcaattggttcgcccagggacacgcaaggcatctggttgatgcaggtgttctggttagaacgggtgtacttggtcaggttatagatgtcgatacctgcttcgcccgggtacatctcgtcttcgttaactttgataacgatacgggaagcatccacgtactgaacggtaccgccacgtttagctaccgcagtaacaccggagtcaacggcaacagcacgttccataccggtaccaaccagcggcttatcagcgcgcagagtcggaaccgcctgacgttgcatgttcgcacccatcaatgcacggttggcgtcatcgtgttccaggaacgggatcagggacgcaccgacggataccacctgctgggtggatacgtccatgtagtcaacctggtcgcggctgaacaagctggattcgcctttactacggcaggtaaccagatcttcaacaaagtggccttcgtcatccaggttggagttcgcctgagcaatgacgtagttaccttcttcgatagcagacaggtaatgaatttcgtcggtaacaacaccgtcggtcactttacgatacggggtctcaaggaaaccgtattcgttagtctgtgcgtacacggacagggagttgatcagaccgatgttcggaccttcaggcgtttcgattggacatacgcgaccgtagtgagtcgggtgtacgtctcgaacttcgaagcctgcgcgttcacgggtcagaccgcctgggccgagtgcggagatacgacgtttgtgcgtaatctcagacagcgggttgttctggtacataaactgggacagctggctggaaccaaagaactctttcactgctgcggaaatcggcttggcgttgatcatatcttgaggcatcagggtatccagatcgcccagagacagacgctctttaaccgcacgctctacacgcaccaggccaacgcggaactggttttccgccatttcgccaacggaacggatacgacggttgccgaggtggtcgatatcatcgacttcgcctttaccgttacggatatcgatgagcttcttcatcacttcgatgatgtcgtctttgctcaggataccggaaccttcgatttcgtcgcgcagcagagaacggttgaacttcatacgaccaaccgcggacagatcgtagcggtcttcggagaagaacaggttctcaaacaggctttcagccgcttcacgagtcggcggctcacccgggcgcatcatgcggtagatttctaccagcgcgctcagacgatcgttggtcgggtcgacgcgtacagtttcagaaatgtacggaccgtggtccagatcgttggtgaacagcgtttcgatacgcttgtggccggactggctcagtttagccagcagatccaggctcagctccatgttcgccgggcagatcagttcgccggtcgcttcgtcgatgtagtctttagaagcaactttacccgcgatgtactcaaccggaacttcgatatgtttgatatcgtctttttccagctggcgaatatggcgcgcggtaatacgacggcctttctcaacgtacactttaccgttggcttcgatatcgaaggaggcggtttcaccgcgcagacgctccggtaccagctccatctgcagcttgttatcgcgaatttcaaagaccactttctcgaagaacaggtcaaggatctgctcagtggtgtaattcagcgcgcgcagaatgatggttgcaggcagtttacgacgacggtcgatacgaacgaacaggttgtctttcgggtcgaattcgaagtccagccaggaaccacgataagggatgatacgtgcgttatacaggaccttaccggaagagtgagtcttacctttgtcactgtcaaagaagacgcccgggctacggtgcagctgagaaacgataacacgctcggtaccgttgataacgaaggtaccgttgtcggtcatgagcgggatttcgcccatgtagacttcttgttctttaatgtctttaacggtgccttccggcgcttcgcgctcgtagatcaccagacgcagttttacgcgcagcggtgcggaatacgtcacgccacggatctgacattctttaacatcaaaaacaggttcgcccagacggtagctgacatactgcagctctgaattaccgctgtagctctgaatcgggaatacggaacggaaggctgcttccagaccatactgcccttcaggatcttgctcgataaacttctggaacgagtcaagctggatagaaaggagataaggcacatccagaacttgtggacgtttaccaaaatccttacgaatacgttttttctcggtataggagtaaaccatagggttcctcagctcgctgacaagtcgacccatctgcccggaaagggcagttttttatgcaacactattttgttgaccggaaaatggaacactttccgcaatgcctgttgctatcacgcttaaaccatttcattgcgatttacacagcccaggaaccctaacctgtcgcagtatattaagtcgtcgatagaaacaagcattgtgaggcaaaccagcagtcaaacagtgtgaaatgctactggcgccttacagcgcaaaaaggctggtgactaaaaagtcaccagcctcagcctaatttctcaggctgcaaccggaagggttggcttatttaacttcaacttcagcgccagcttcttccagagattttttcagagcttcagcgtcgtctttgctgatgccttctttcagtgcagccggtgcagattctaccaggtctttagcttctttcagacccaggccagtcgcgccacgtactgctttgataacagcaactttgttagcgccagcagctttcagaattacgtcgaattcagttttttcttcagcagcttcagccgggccagcagctacagctacagcagcagcagcggaaacaccgaatttttcttccattgcagagatcagctcaacaacgtccattacggacatagcggatactgcttcaatgatttgatctttagtgatagacatttaaattgttcctgaatatcagaataagtttatacgtaagcgagtgctttacaaagataactgcgattaagcagcttctttcgcatcgcgtacagcagccagagtacgaaccagtttgccagccgaagcttctttcatggttgccatcaggcgtgcaattgcttcttcgtaggtcggcagagttgccaggcggtcgatttgcgacgccgggatcagctcaccttcaaaggcagcggctttgacctcaaattttgcattcgctttcgcgaactctttgaacagacgagcagcagcgcccgggtgttccatagagtatgcaatcagggtcggaccaacaaacgtgtctttcaggcactcgaacggagtaccttcaacgacgcggcgcagcagggtgttacgaacaacacgcatgtaaacgccagcttcacgacctgctttacgcagttcagtcattttatctacagttacgccacgggaatccgcaactactgcagacagcgcgcctttggctacttcgctgacttcagcaacaatcgcttgtttgtcttgaagatttaaagccattagctttgctcctggatgtttgccagagcttatgctctggaactcacttcactctattcaacgaatagagcgtcttaatacggtgagcagaaacaagccagagtatccaaaaaataatcttagcgttctgtcaccgtctacgcaggggattaagtttcttacgaaacacctgcggtcttcgacggaggcctggataggccaggctccaacgaacaaatctgttagccgctaactttcgttagcaaacgtgggggtaagattgtagacaaaatcaccgcccacgtaaaggcattagtttgcagaagcgttcaggccagcctgatctactgcaacacctgcacccatggtggtggagatgctaactttcttgatgtacacgcctttagcctgagtcggttttgcttttttcagcgcaaccagcagagcttccaggttttctttcagtttgtcagcgtcaaagtccactttaccgatggtggtgtggatgatgccgtttttgtcgttacgataacgaacctgacctgctttcgcgttcttaaccgcttcagcaacgttaggagttacggtaccaactttcgggtttggcatcaggccgcgcgggcccagaacctggcccagctggccaacaacgcgcattgcatccggggaagcaataacaacgtcaaagttcatttcgcctttcttgatctggtcagccagatcttccatacctaccagctcggcgcctgcagctttagcagcttcagcgttcgggccctgtgcaaatacggcaacgcgaacagaacggccagtaccgtgcggcagtacagttgcaccacgtacgttctggtcagatttacgagcatcgatgcccaggtttacagcaacgtcaacgctttcaacgaacttagcggtcgccagttctttcagcagagagatggcttcgttgatgtcatactgtttagttgcatcaactttctcacgaatcacggacatgcgcttggtcagtttagccatttcttagtcctccactaccaggcccatggaacgtgcagtaccttcgatggagcgagtcatcgcttcaatgtcggcaccagtcatgtcggcagctttggtctgcgcgatttcctgcagctgagcgcgggaaattttaccaactttatctttgttcggcttaccagagccggacttgataccagccgcttttttcagcagaactgctgccggcggagttttggtaacgaaagtgaaagaacggtcagcgtaaacggtgataacaaccgggattggcagacctttttccatggattcggtttttgcgttgaacgctttgcagaattccatgatgttaacgccctgctgacccagtgctggaccaaccggcggactcgggtttgccataccagctgcaacctgcagcttgacgtaggcttgtactttcttagccattcttaaatcctcgaattgggtattaacgcttcagagaagctccccgtgattaaacatcgttttacgggccaggcccataaaaacaaaaggcgcgaaattgtatgccaatttcgcgccctatgcaacgattaaatcgctgcttttttgatcgccggcttacgccttctcaacctggccgaagtccagttctaccggagtcgcacgaccgaagatagaaacggaaactttcaggcgagacttctcgtagtccacttcttcaacaacgccgttaaagtcagcaaacggaccatcgttgacgcgaaccatttcgcccggctcaaacagcgttttcggacgcggcttatcgccaacctgctgcagacggttcatgatggcatcgacttctttgtcgctgatcggcgccggacggtcggaagtaccgccgatgaagcccatcacgcgcgggacgctgcgcaccaggtgccagctcgcgtcgttcatgaccatctgaaccagaacgtagcctgggaagaatttgcgttcgcttttgcgacgctggccgccacggatttcaaccacttcttcggttggaaccatgacttcgccaaacaactcttccatgttgtgtaatttgatatgttcacgcagcgaagtagctacgcgaccttcaaaaccggaaaacgcctgaacgacgtaccagcgctttttaggagcttcagacatctcagaacctcaggccagtgataaaggataccaggcgaaccagaataccatccagtccccacaggatcagtgacattactgcagttacggcagcaacaatcagcgtggtgtgcagcgtttcctggcgggtcggccagatcactttgcggacttcggttctcgcttcgcgggcgaaagcgactgtcgccttaccttttgtcgttaacagagcgacgccaccggcagcagcgataagaatcaccacagccagcgcacggatcgccagcataatgtcgcgataaaggaagttgcctacgatggctacaatcagcagcacggcaacgataacccacttcaacgcttccaggccgcgcccgctcccttgagcttcggtattcgcactcataaaccaacctgtcacaagaattcagacaaacatcttcgccccgcattaaatgcgaggcgaccaaaccgaaatgctctgctgcgtttcggactttacgccctcttcagagcctgtctcagcaatgattatgacaaaaaaaatcactgatgagccaggttctggtgtgaaagcgtgcaaaaagggcatcaaatgatgcccttttattgcgcattgcgtcaaatgttatcagcgattagccgagaactttagcaaccacgcccgcgccaacggtacggccgccttcacggattgcgaaacgcagaccatcgtccatcgcgatcgggtggatcagggtaacaaccattttgatgttgtcgcccggcattaccatctctacgccttccggcagttcgatggtaccagtcacgtcagtagtacggaagtagaactgcggacggtagcctttgaagaacggagtatgacggccgccttcgtctttggacaggatgtacacttcagattcgaacttggtgtgcggcttgatgctgcccggcttagccagtacctgaccacgttcgatttcttcacgtttgataccacgcagcagaacgcctacgttctcaccagcacggccttcgtccagcagtttgcggaacatttcaacgccagtacaggtggttttcgcggtgtctttgataccaacgatttcaacttcttcaccaactttgatgataccgcgctctacacgaccggtaacaacggtaccacgaccggagatggagaatacgtcttcgatcggcagcaggaacggcttgtcaatcgcacgctctggttccgggatgtaagaatccaggaagccagccagttcgatgattttcgcttcccactctgcgtcgccttccagcgctttcagagcagaaccacgaacgatcggagtgtcgtcgcccgggaaatcgtactgagacagcagttcacgaacttccatctcaaccagttccagcagctcttcgtcatcaaccatgtcgcatttgttcaggaacacgatgatgtacggaacgcctacctgacgacccagcaggatgtgctcacgagtctgcggcatcgggccgtcagtcgcagcaacaaccaggatcgcgccatccatctgagcagcaccggtgatcatgtttttaacatagtcggcgtggcccgggcagtctacgtgcgcgtagtggcgagtcggggtgtcatattcaacgtgggaagtgttgatggtgataccacgagctttttcttccggcgcgttatcgatctgatcgaatgcgcgagcagcaccgccgtaggttttagccagtacggtagtgattgcagcggtcagcgttgttttaccatggtcaacgtggccgatagtaccgacgttaacgtgcggttttgtacgttcaaacttttctttagacatcgattgtccctctaagacacggataaatcggtgatatcaccacatcaaccaggcaacatgcccgacttgttgaatgcaataaacagagagaaacagggaaggagagataaagaagtggtgctgatacccagagtcgaactggggacctcacccttaccaagggtgcgctctaccaactgagccatatcagcacgtctggagcgggcagcgggaatcgaacccgcatcatcagcttggaaggctgaggtaatagccattatacgatgcccgcatcctgaaactcggctacccagttctttctgtaacaaaaaagagattgctctctttaatgttgagctgattagtttacccaaccaactccggctacgcaaagcgttgcccgaaagtggtggtgggggaaggattcgaaccttcgaagtcgatgacggcagatttacagtctgctccctttggccgctcgggaaccccacccaaattgttatggtgccgactaccggaatcgaactggtgacctactgattacaagtcagttgctctacctactgagctaagtcggcatcaagtagcgcgcattctagggagacctgcgagttcatgcaactaaaaatttgcataaaacgttctcttgctcacattttgtgctcttacgcgaaaaaacggtgtaatttcaaacaatggagtgcaaaaaaagcgcattcctcaacgcagaatttgtttcgctgcgcctgtcagatataagaatgacggttttttcacctgcagatcctggtggcaggcgcgatcgctaacctgcaaagatagcagactcgctttctcccctctttctacttattcatcacttgtgatgctgctatgagaaagcgcccttcgatgagtttttttcttattattcccggcattctggtgttaccctcctgcccattgtcctgattaactagtgtgaagcatcaccgctacctctttttcggtgatagtaagaacatgcttatgagcaaaaaagagcagacgttaatgacaccctatctacaatttaaccgcaaccaatgggctgcacttcgtgattccgttccgatgacgctgacagaggaagaaatcgcgcggttaaaaggcatcaacgaagatctttcgctggaagaagtcgccgagatctatttgccgctgtcacgtttgctcaatttctatatcagttccaacctccgtcgccaggcggtgcttgagcaatttcttggcaccaacggccagcgtattccttacatcatcagtattgcaggtagcgttgcggttggtaaaagtactacagcgcgtgttttacaagcgctgcttagccgctggccggaacatcgtcatgttgaactgataactaccgatggcttcttacatcctaactcggtgttaaaagaacgcggcttgatgaagaaaaagggcttcccgcagtcctatgatatgcatcggttggtgaagtttgtttctgatctgaaatctggcgtaccaaatgccaccgcgccggtctattcccatctcatttatgatgttattcctgatggtgataaaaccgttgctcaaccggatattcttattctggaaggtttgaacgttctgcagagcgggatggattatccgcacgatccgcatcatgtatttgtctctgactttgtcgacttctctatttatgtcgatgcgccggaagacttattaaaaaactggtatatcaaccgcttcctgaaattccgtgaaggcgcttttaccgatccggattcttatttccataattacgcaaaactctcaaaagacgaagcggttaatatcgccacttcattatggaatgagatcaacctactgaacttaaaagaaaatatattaccaacccgagagcgagccagcttgattatgaccaaaagcgcaaatcattcggtcgatcaagttcgcctacggaaataaaaaagggagcgcaagctcccttttttctattcagcgctacgcagcgatatctcgcctcccacccatggtttaattaccccatcctgctcgagtaataatgccccttgcgcatcaattccgcgagaaataccaaatatttccttatcaccaataatcagcttcaccggccgattaataaagttatccagtttttcccagcgtggcaggtaaggtgttaaaccttcctgttcgaatagttgcaaaccggtacgtaatgctttcaccagacgcgccgtcagggtgttacggtcaatgaagactcccgcctcctggaggctgatccacccctgattgacaatgtcagactcaacgcggcgcatcacgaggttgataccagcgccgctgacgatttgcgcggcatcaccggttttgcctgtcagttctaccaggataccggacaacttgcggtcctgcagataaatatcattcggccatttgacccgaacgttatccgcccccaggctctgcagtacttctgcaatcacaataccgatcaccaggctcaaaccaatcgcagcagcagggccttgttccagacgccagtacatggagagataaagattggccccaaacggtgagaaccacttacgcccgcggcggccacgaccagcctgctgatattcagcgacacaggcatcacctgacttcagttcatccagacgatccagcaaatactggttggtggaatcaatcaccggcagcacggtaatacgaccttgttcaatctggccggcaatcttttgctcatccagcaattcaatcggttcagggaggctatagcccttccctggtacggtaaacacatcaacaccccagtcgcggagcgtctgcatatgcttgttaattgccgcgcggctcatccccaggcgttcgccgagctgttcgccagagtgaaactcgccatccgccagaatagagatcagcgtcaggggtacggtattatctttcatgcaatcacctcttccgcattcacttcaccgttctctgcgatgaagcgcacttcaggctggagccaaacattaaatttctcgcctacctgctggcggacatagtgtgccaacccaacgacatcatcgctggtcgcctggttatcgttgatcagcaccaacgcctgctgacggtgaacggcagccccgccgatagttttaccttttagctggcactggtcgataagccaaccggccgccaatttaatgctgccgtcagcctgtggataatgtggcgcgccagggaatgcagccagcaattcctgagcaacctgagcactgacgaccgggttcttaaagaagctaccggcattaccattcactttaggatccggtaacttggtcatacgcatatggcaaaccgcatcaaacacctggcggggggtaacagtttgcggatcgagacgagttaaatccccgtaggtcaggacgggctgccatgctttttccagccgtagcccaacagccactatcgcgtaacgatcctgatattcatgtttgaaaatactgtcgcgatagccgaaacggcactctgcggcagaaaggcgctgcttgcgacctgtttcgagttcgatacagtctacgtattcacatactcgctgcagttcgacgccataggcaccaatattttgaattggcgaagatcctgcgcagccaggaattaaagccagattttccagcccaggcattccattttccagcgcaaattgcaccagttgatgccagttttcaccggcgccaacgtgcaaacgccaggcttcagacgtttcgcttacctcgatccccatgatgcggttgatgatcaccgtgccggaatagtctttcaggaacagaacgttgcttccttctccaaggatcagacaaggttggtgctctgcagcggcggcttgccaggcagccagcaactgttgttcattttcagcaagtacaattgctttggcagaatggctaatgccaaaggtattccagggtttgagggagaggttcatagtggcttcctgatgcaaaatcagcattagtttaccgtatctggcgagggaaggcttgcctgaataatatcggttcggggccgggttcatctcatcatgggcgtgaatcaagggtgccggcaggcaggagcctttcccggaggcggtgctgcgcaccttgtccgggctacgggtctgtagccccggtaagcgcagcgccaccggggaagatggcggcgcctctggccgcaaaacacaaaaacaaaaggcccggtcttccgactgagcctttcgttttatttgatgcctggcagttccctactctcacatggggagaccccacactaccatcggcgctacggcgtttcacttctgagttcggcatggggtcaggtgggaccaccgcgctatcgccgccaggcaaattctgttttcaacacgtcctcaggacgcatcgagtaatctgtatcaggctgaaaatcgtctcaaatccgccaaaacaccttcggcgttgtaaggttaagcctcacggttcattagtatcggttagctcaacgtatcgctacgcttacacacccgacctatcaacgtcatcgtctttaacgttccttcaggagacttaaagtctcagggagaactcatctcggggcaagtttcgtgcttagatgctttcagcacttatctcttccgcatttagctaccgggcaatgccattggcatgacaacccgaacaccagtgatgcgtccactccggtcctctcgtactaggagcagcccccctcaattctccagcgcccacggcagatagggaccgaactgtctcacgacgttctaaacccagctcgcgtaccactttaaatggcgaacagccatacccttgggacctacttcagccccaggatgtgatgagccgacatcgaggtgccaaacaccgccgtcgatatgaactcttgggcggtatcagcctgttatccccggagtaccttttatccgttgagcgatggcccttccattcagaaccaccggatcactatgacctgctttcgcacctgctcgcgccgtcacgctcgcagtcaagctagcttatgccattgcactaacctcctgatgtccgaccaggattagctaaccttcgtgctcctccgttactctttgggaggagaccgccccagtcaaactacccaccagacactgtccgcaaccccgattaggggccaacgttagaacatcaaacattaaagggtggtatttcaaggttggctccacgcagactggcgtccacgcttcaaagcctcccacctatcctacacatcaaggctcaatgttcagtgtcaagctatagtaaaggttcacggggtctttccgtcttgccgcgggtacactgcatcttcacagcgagttcaatttcactgagtctcgggtggagacagcctggccatcattacgccattcgtgcaggtcggaacttacccgacaaggaatttcgctaccttaggaccgttatagttacggccgccgtttaccggggcttcgatcaagagcttctccttacggataaccccatcaattaaccttccggcaccgggcaggcgtcacaccgtatacgtccactttcgtgtttgcacagtgctgtgtttttaataaacagttgcagccagctggtatcttcgactgatttcagctccacccgcaggggcttcacctacatatcagcgtgccttctcccgaagttacggcaccattttgcctagttccttcacccgagttctctcaagcgccttggtattctctacctgaccacctgtgtcggtttggggtacgattcaatgttacctgatgcttagaggcttttcctggaagcagggcatttgttacttcagcaccgtagtgcctcgtcatcacacctcagcgttaaaaggtaccggatttacctggaacctccgcctacatgcttaaaccgggacaaccgtcgcccggctaacatagccttctccgtccccccttcgcagtaacaccaagtacaggaatattaacctgtttcccatcgactacgcctttcggcctcgccttaggggtcgactcaccctgccccgattaacgttggacaggaacccttggtcttccggcgtgcgggcttttcacccgcattatcgttacttatgtcagcattcgcacttctgatacctccagcaaccctcacaggccaccttcgcaggcttacagaacgctcccctacccaacaacacatagtgtcgctgccgcagcttcggtgcacagtttagccccgttacatcttccgcgcaggccgactcgaccagtgagctattacgctttctttaaatgatggctgcttctaagccaacatcctggctgtctgtgccttcccacatcgtttcccacttaactgtgactttgggaccttagctggcggtctgggttgtttccctcttcacgacggacgttagcacccgccgtgtgtctcccgtgataacattcttcggtattcgtagtttgcatcgggttggtaagtcgggatgaccccctagccgaaacagtgctctacccccgaagatgagttcacgaggcgctacctaaatagctttcggggagaaccagctatctcccggtttgattggcctttcacccccagccacaagtcatccgctaatttttcaacattagtcggttcggtcctccagttagtgttacccaaccttcaacctgcccatggctagatcaccgggtttcgggtctataccctgcaacttaacgcccagttaagactcggtttccctgcggctcccctatacggttaaccttgctacagaatataagtcgctgacccattatacaaaaggtacgcagtcacaccataaaggtgctcccactgcttgtacgtacacggtttcaggttctttttcactcccctcgccggggttcttttcgcctttccctcacggtactggttcactatcggtcagtcaggagtatttagccttggaggatggtccccccatattcagacaggataccacgtgtcccgccctactcttcgagttcacagcctgtgcattttggtgtacgggactatcaccctgtaccgtcggactttccagaccgttccactaacacacaagctgattcagactctgggctgctccccgttcgctcgccgctactgggggaatctcggttgatttcttttcctcggggtacttagatgtttcagttcccccggttcgcctcgttaacctatgtattcagttaacgatagtgtgacgaatcacactgggtttccccattcggacatcgccggctgtaacggttcatatcaccttaccgacgcttttcgcagattagcacgtccttcatcgcctctgactgccagggcatccaccgtgtacgcttagtcgcttaacctcacaacccgaagatgtttcgtaaaacaccaacgtgtcgcgaaaatttgagagactcgaacacacattaactgtgtgtcgtttcaattttcagcttgatccagatttttaaagagcaaaacttcgcagtgaaccttttcaggtacactctgaagttttctgtttttgcagtaaggatggtggagctatgcgggatcgaaccgcagacctcctgcgtgcaaagcaggcgctctcccagctgagctatagccccatcgaatgaatctcttttaacctttaattcgttttcgggcgcggcgtggtgaagcgaagcatactgaagtatgcgagctttgccacaacaaagcacgagagcgaatttggtaggcctgagtggacttgaaccaccgacctcacccttatcaggggtgcgctctaaccacctgagctacaagcctgcagagattacttactgctgtattttcatcagacaatctgtgtgagcactacaaaggcaggttctttaaggtaaggaggtgatccaaccgcaggttcccctacggttaccttgttacgacttcaccccagtcatgaatcacaaagtggtaagcgccctcccgaaggttaagctacctacttcttttgcaacccactcccatggtgtgacgggcggtgtgtacaaggcccgggaacgtattcaccgtagcattctgatctacgattactagcgattccgacttcatggagtcgagttgcagactccaatccggactacgacatactttatgaggtccgcttgctctcgcgaggtcgcttctctttgtatatgccattgtagcacgtgtgtagccctactcgtaagggccatgatgacttgacgtcatccccaccttcctccagtttatcactggcagtctcctttgagttcccgaccgaatcgctggcaacaaaggataagggttgcgctcgttgcgggacttaacccaacatttcacaacacgagctgacgacagccatgcagcacctgtctcagagttcccgaaggcaccaaagcatctctgctaagttctctggatgtcaagagtaggtaaggttcttcgcgttgcatcgaattaaaccacatgctccaccgcttgtgcgggcccccgtcaattcatttgagttttaaccttgcggccgtactccccaggcggtcgacttaacgcgttagctccggaagccacgcctcaagggcacaacctccaagtcgacatcgtttacggcgtggactaccagggtatctaatcctgtttgctccccacgctttcgcacctgagcgtcagtctttgtccagggggccgccttcgccaccggtattcctccagatctctacgcatttcaccgctacacctggaattctacccccctctacaagactctagcctgccagtttcgaatgcagttcccaggttgagcccggggatttcacatccgacttgacagaccgcctgcgtgcgctttacgcccagtaattccgattaacgcttgcaccctccgtattaccgcggctgctggcacggagttagccggtgcttcttctgcgagtaacgtcaatcaccaaggttattaaccttaatgccttcctcctcgctgaaagtactttacaacccgaaggccttcttcatacacgcggcatggctgcatcaggcttgcgcccattgtgcaatattccccactgctgcctcccgtaggagtctggaccgtgtctcagttccagtgtggctggtcatcctctcagaccagctagggatcgtcgcctaggtgagccattaccccacctactagctaatcccatctgggcacatctgatggcatgaggcccgaaggtcccccactttggtcttgcgacgttatgcggtattagctaccgtttccagtagttatccccctccatcaggcagtttcccagacattactcacccgtccgccgctcgtcacccgagagcaagctctctgtgttaccgctcgacttgcatgtgttaggcctgccgccagcgttcaatctgagccatgatcaaactcttcaatttaagtttgatgctcatgaattaaacttcgtaatgaattacgtatgttcactcagagacttggtattcatttttcgtccgaggacgttaagaatccatgtcactttgagtgcccacacagattgtctgataaattgttaaagagcagtgccgcttcgcttttcgctgcggcgcggggtgtgcatattacgctttcccgcctcagagtcaagcatttatttttgcttttctccgcgaggttctcaccggaaccccgctgacccggcggcttgtttgccgttgttccgtgtcagtggtggcgcattatagggagtaattctgaagtgacaagaggaaatttaaaaaaacttttcgttcgctcgattttccaccataacgcgagttttacgcgctatttgctcgtcatttgcgcgatttctcgcgcaaatctggcaacctgcggccaatcggtataaaccacttctttactggtatccgtttccccgccggtcatcttcataattaagcgaatcatcattcgatcgtaccagcgatagcgcggataacgcagcgcaccggcaaataccgcgcagctctgcggctgccacggcgagttaaggagaaacttgcgcgtatagctgttggtttgcggggtgcgcttttccggtttgcgcgccactaggtttaccgagaagaatgcccccggcaacgcctgcagtgatgccaggtgctttttcacaaagcggtccagcgctggatgaaagtgcccgtagcgaatagaagcgccaatcaccacccgatcgtaatgatgccactcaaccgtctcggtacggttcaggttcacagtatccgcatcaacccccagctctttgagttcagaagccaggtaggaggcaatttcacgggtctgcccatcccgggtggagaaaagaattaaagttttcacgagcactcctgttattcgcgccagaaagtgggagtaaagagcaccaataaggtgaacacttccagacgaccaaacagcatgttagcaatcaggatccatttcgcgaccgggttcattgtcgcaaagttatcagcaacgaccccaagaccaggccccaggttgttcaatgtcgccacaactgaagcaaaggcagagaagtcatcaaccccagtcgcaataatagccagcatactaatgataaagaccagcgcataggcggaaaaaaatccccacacggcttccagaatacgttccggtagcgcacggttgcctagcttaatgctatagaccgcattcgggtgcacgaggcgcttaagctcacgattcccctgcttaaacagcaacaggatacgaatgacctttaagccaccgcccgttgacccggcgcagccgccgataaatgcagagcatagcagcaataccggcaagaacagtggccagcgcgcaatactatcggtagtaaacccagcggtcgtcgccatcgatactacctggaagaacgcctggttcagcgttgttaacaccgagccgtagacattatgtagccacaataccagtgtacagacgataaccagggttagctgaacaccgataaacattctgaattccgggtcacgccagtaaacccgcaaactgcgtccacttaatagcgaaaagtgcaggccatagttacagccggagatcagcaggaagatggcgatgatggaattaatcatcgggctattaaagtagccgacgctggcatcgtgagttgagaagccgccgatagcgatggtcgcaaagctatggccgatcgcgtcgaatgccggcattccggcaaaccacagcgccaatgcgcaggcgacggttaataagacataaataagccacagcgtttttgccgtctcggcaatacgcgggcgcattttattgtctttcaacgggcccggcatttccgcccggtagagttgcatcccaccgacgccgaggataggcaaaatcgccaccgccagcacgatgatccccataccgccgaaccactgcagcatctggcgatagaacaggatggcatgaggcagtgagtccagtcccaccagcgtcgtcgcgccggtagtggttaagccggagaaggattcaaaaaaggcatccgtcaccgtcagattaggctgttcagcaaagataaacggtaacgcaccgacgctacccaacacggtccagaacagcacgacaatcagaaacccctcgcgggatttcagttcgcctttttgcttgcggttcggccaccacagcatggagccaatcgccagggcaacaaagaaggtttgggtgaaagctcgccccgcgccatcgcgatatatcaaggccactaatcccgggacaatcattgtccccgaaaataagatgaccaacagtccaacgattcgggttatcgcgcgaaaatgcatctctggcgcttcctttgggttacaaaaaaatcaggtggggattattcgtcaatcttcagtaattgcaatgaaccacgactaaaatcagccagttttgtcgaaaaagaggccacttcagcttgcggaagcgcgacgcgcagttgcacagacgcctgatattcgctttccacaataatgcccgagaactgcgccagcaacgcttctaccccggccagctgtccgtattcacattgcaaagtatatgcggttaacggcgtcttgcgctgcgttttcaactgcgcaagcgcctgatggacaccgccgccataggccttcaccaggccgccggtacccagcagaataccaccgtagtagcgcaccaccaccgcggttatctcgccgacgccgctgcccatcagctgcgccagcatgggtttacctgccgttcccgccggttcgccatcgtcagagaaacccagctgctgtgaatcatcaggaggcccggcaacccacgccacgcagtggtgacgagcgtccgggtgctcagccctcaccgattcgacaaacgctttcgccgccgccacgccgtcggtatgcgccaacagcgtgatgaaacggctctttttgatctcttcaacaacgctcaccggcgcggccggcaccaaccaactttccattacgccagtttcaggtcgcgcgtcatattttcgatgctgttttcgtgaaccaccacgttatcttcgatacgaatcccgccaaacggcttcatggcttcaattttctgccagttgaagtgcttgctgaactgcccttcacgccatggcgccaacagtgactcaataaagtagatgcctggttcgatagtcaacaccatacgcggttcgagaatacgggtgcagcgcaggtaaggatacttcgacggcgccgccagatgcgtaccggtatcgtcttgcatgaaaccggcgacatcatgaacctgcaggcccagcggatgaccaatcccgtgtggcataaacggcccggtcagatcgttttccaccatcgcctcttcgctcatgccggtcactagctggtgtttacgcagcagctttgcgatgcgctgatggaactgaatatggtaatcaacgtagctggtgccagccttcatggtgctaatcagcgccagttgctcgtcgttaacgtctttaatcagctgcgcgaaatcgttgtcgctgtggcctgcccaggtacgagtcaggtccgcggcatagccgttgtactctgcgcccgcatccaacaagaagctacgcatttcggttggcgcacggtgatccagcttggtgtagtgcaatacggccgcatgctcattcagcgccacgatattgctgtaagggacgtcggtatcgcgatgaccggtcgccgtcaggtaagcctgattaatatcgaactcgctcatccccgactggaaagcttcgtgggccgcgcgatggccgttcaccgccgatttctgcgcttcacgcatacaggccagctcatagtcggttttgtaagcgcgataatagtgcagatagtcgataacgcctttcgggttgattttgtctgccgcgatctccagacctaaagcacgttccggcaccgggccgatatacgctatgttgccacgcgccgcgggcagttgaccgccaatgccatcgtctttcggcaacgcaataacatccacttcctcagtccagaaagaggtcggcagcggctcaacgttgtgccagtaatcgaccggcagatagaaccacagtttcggtttattcacgccatccaccagcagccagcagtttggcacctgggtcaccggcacccacgccttaaactgcgggttaaccttaaacggatacggatgatcgtcgaggaagacattgatcagctcgccggagtggataagcagagcatccagcttgaagcgatctaaaactttgcgggtacgttcttgtagggtaacgatatgatttttataaagcgcggccagtgattccatcttttatcctttgcttttattggatcgtgattctccgcatcttagcacattggctccaggccgggtgatttctaccggatgtgatccgaccagcaattatttaaagagtaatttgcattttcttaacataaattccacactccgagtcatctggtatgaccagatcatattgctggattcaggagactgacatgctctacaaaggcgacaccctgtacctcgactggctggaagatggcattgccgaactggttttcgacgcccccggctcggttaacaagcttgatactgcaaccgttgccagcctcggtcacgcgctggacgtactcgaaaaacaaaaagatctcaaagggctgctgctgcgctctgaaaaagcggcctttattgtcggcgccgatatcaccgaattcctttcactattcctggtgccggaagaacagttgagccagtggctgcacttcgccaacagcgtcttcaatcgtctggaagatttaccggtccctactctgtcagcggttaacggctacgcgctgggcggcggctgcgaatgcgtactggcgaccgactatcgcctcgccacgccggatctgcgcatcggcctgccggaaaccaagttgggcattatgcctggcttcggcggttccgtacgtctgccgcgcctgctcggcgccgatagcgcgctggaaattattgccgccggtaaagacgtcggtgccgatcaagcgctgaaaattggcctcattgacggcattgttgccgcggaaaaactgcatgacggcgcgctggcgattctgcgccaggcgattaatggcgacctggactggaaagccaaacgtcagccgaaactggagccgctgaagctcagcaaaattgaagccgccatgagcttcactattgccaaaggtatggtcgcgcaaaccgccggaaaacattacccggcgccgatcaccgcggtaaaaaccatcgaagccgccgcgcgtcttggccgtgatgacgcgctgaagctggaaaaccaaagttttgttccgctggcgcacaccaacgaagcgcgcgcgctggtcggtatcttccttaacgaccagtacgtcaaagcgaaagcgaaaaaactcactaaagatgtcgagacgccgaagcacgctgccgtattaggcgccggcattatgggtggcggcattgcttaccagtcagcctggaaaggcgtgccggtggtgatgaaagacattagcgacaaatcgctgacccttggcatgaccgaagcggcgaagctgctgaataaacagctggaacgcggaaaaatcgacggcctgaagctggccggagtgattagcaccattcagccaacgctggaatacagcggttttgaccgcgtggacatcgtcgttgaagcggtggtggaaaacccgaaagtgaagaaagcggtactggcggaaaccgaagagaaagtgcgtccggacaccgtgctggcttccaacacctcaacgattcctatcagcgagctggccagcgttctgcagcgcccggagaatttctgcggtatgcacttctttaacccggtacatcgcatgccgctggttgaagtgatccgcggcgagaaaacttcggacaagaccattgccaaagtcgtggcctgggccagcaaaatgggcaaaacaccgatcgtggtgaatgattgccccggcttcttcgttaaccgcgtcctgttcccctatttcgcaggcttcagccagctgctgcgcgacggcgcggatttccgcaaagtcgacaaagtgatggaaaaacagtttggctggccgatgggcccggcctatctgctggatgttgtcggcatcgataccgcgcaccatgctcaggcggtaatggcggcggggttcccacagcggatgcagaaagattatcgcgatgctatcgacgcgctgtttgacgccagccgtttcggccagaagaacggcctcggtttctggcgttataaagaagacagtaaaggtaagccgaagaaagaagaagatgccgcagtcgatagtctgctggccgaagtcagccagccgaagcgcgatttcagcgatgaagagattatcgcccgcatgatgatcccaatggttaacgaagttgttcgctgcctggaagaaggcattatcgccagcccggcggaagcggatatggcgctggtatacggcctgggcttccctccattccacggcggcgcattccgctggctggacaccatcggcagcgcaaaatatctcgatatggcgcagcaataccagcacctcggcccgctttatgccgtgccggagggtctgcgtaataaggcccgtcataacgaagcgtattatcctccagtagaaccagcccgtccggttggcgaactgaaaacggcttaaggagtcacaatggaacaggttgtcattgtcgatgcaattcgcaccccgatgggccgttcaaagggcggcgcctttcgcaacgtgcgtgcggaagacctctccgcacacctgatgcgaagcctgctctcgcgtaacccgtcccttgaggcgagcgcgattgacgatatttactggggctgcgtgcaacaaacgctggagcagggtttcaacattgcgcgtaacgccgcgctgttggcggaaataccgcactcggtaccggcaacaacggttaaccgcctgtgcggttcctccatgcaggcgctgcacgatgccgcccgtatgatcatgaccggcgacgccagtgtctgcctgattggcggcgttgagcacatgggccatgtgccaatgagtcatggtgtcgatttccatccgggccttagccgtaacgtggcgaaagccgccggtatgatggggctgaccgcggaaatgctggcgcgtctacacggcattagccgtgaaatgcaggatcaattcgccgcacgttcccacgctcgcgcctgggcggcgacgcaatccggggcattcaaggcggagattatcccgaccggcggccacgatgccgatggcgtgctgaaatcctttaattatgacgaagtgatccgcccggaaaccaccgtagaagcgctggcggcgctgagaccggctttcgatccggtgaccggcacggtaacggcaggtacctcttccgcgctttccgacggcgcggcggccatgctgctgatgagcgaaagccgcgcccgcgagctggggctgaagccgcgcgctcgcgtccgttcaatggcggtggtcggctgcgatccgtccattatgggttatggcccggttccggcctcaaagatggcgctgaaaaaagcgggattatccaccagcgatatcgacgtctttgaaatgaatgaagcgtttgccgcgcagatcctgccgtgtattaaagatctgggcttaatggagcagatcgacgagaagatcaaccttaacggcggcgcgatcgcgctcggccacccgctaggctgttccggagcgcgtattagcaccacgctgattaaccagatggaacgcaaagacgcgcagttcggtctggcgaccatgtgtatcggcttaggccaggggatcgccaccgtattcgagcggatgtaggaaaaaactcgatgccattattgcctgccagccaacaggcaataatggattagagggggtttagttgccgttcttcccgcctgtcaggggcgggttttttattttcagataaacgcaaacgcatcgccaaacaggcgatcttcacgcgcgccgcgctcattacagaacagatcgcgggcaattttggccatctcaaaacgaccggcaatgtaaatatcatgctcggccagcgtaccgtaatcctgcagcacggcggtgagtaccgtaccggagcgaccacgccacccttcttccggctgctcgaccaccggctcgatgcgcagattcggatgcttgatgcttaacgcttccagctcggccagatcgtacagatgcttagcctcgcggccgccccaataaatggcgatatcgcgatccgggttacgcgccagcgcggttaacagaatagaacgcacataagagaatccggtaccgccggcgatcagaatcagcgggcgatcttcgtcatcgcgcagccacgcttcgccatgcggaatatcaacctcaatttcacgctctttcagaatgcgatccatcaccgccatcgcatacagattgagttcagaagcaccgatatgcagctcgataaactcgtgctctgacggcgtggaagccatagagaacggacgcttgtcgcgctcatccatcactaccatcagatattggccggcgcggaaagaaaatgccgcttccggtactaatcgaacgcgatacacggtatcggtaatcgcctccaccgaggtcactttacagcttaaggttgtcatgcgtcccctctgtcgggtctatagagcaaaacagcggcgttagccccgcttactgttatttaaagatggccagttcatcccagatggcgtcgatacgcgccgtcacctcaggatcttttttgattggacgaccccattcacgctgggtttcgccaggccatttatttgtggcatccagccccatttttgaacccaggccggaaaccggcgaggcaaaatccagataatctattggcgtattttctaccagtaccgtatcacgagccgggtccatacgggtagtaatcgcccaaatcacgtcattccagtcgcgcgcgttcacgtcatcgtcgcagacaatcacgaacttggtatacatgaactggcgcaggaacgaccagacgcccatcatcacgcgcttggcatggcctgcgtactgttttttcatggtcaccaccgccaggcgataggaacacccttccggcggcagatagaaatcgacgatttccgggaactgcttttgcagaatcggcacaaagacttcgttcagcgccacgcccagcaccgcgggttcatccggcggacgaccggtataggtcgaatgataaatcgcgtcttcgcgctgggtaatatgggtcaccgtaaataccgggaagctgtctacttcattgtagtagccggtatgatcgccgtatggcccttccggcgccatctcgccggcctcaatgtagccttcaagcacgatttccgcgctggccggcacttcaaggtcattggaaacgcacttcaccacttcggtcttggtgccgcgcagcaagcctgcgaaagcgtattccgacagggtatcaggaaccggcgtcactgcgcccagaatggtcgccggatcggcgccaagcgccacggaaaccggaaaacgttcgccgggatgcgccgcgcaccactcctggaaatcgagcgcgccgccgcggtgggacaaccaacgcatgatgagtttatttttaccgatcagctgctggcgataaatacccagattttgcctctccttgtgcgggccgcgggtcaccgtcagcccccaggtaatcagcggcgcggcatcttccggccagcaggtcataatcggtattttgttgagatcgacatcatcgccctggatgattttttgctgacaaggcgcgccgcgcaggcgtttggtcggcatattcaacacttgcttgaactgcggcagcttatcaaacagatcgcggaagccttttggcggctccggctctttcagaaaggccaatagcttcccgacttcccgtagcgaactgacgtcttcctggcccatccccagcgccacacgacgcggcgtgccaaacaggttgcacagcaccggcatcgagtagcctttcgggttttcaaacagcagcgccgggccgccggcacgcagggtgcggtcggcaatttcggtaatttccagatgcgggtcgaccggcagggttatccgttttagctcgccctgctgctcaagtaatgtcagaaagtcgcgtagatcgtggtatttcatggagttattattgacctctatacaagcggctgattatacgattttcgccgcaacgatgctgtacttttgttaaataagcgtaaatgaacaggctatttacgctttcgcttataatggttttcgcgattgttccaggcttttgttatgcttgcaggtagtaaagcggaaagagtcattatgcaagcctggtacttactttattgcaaacgtgggcagcttcagcgcgcccaggaacaccttgaacgtcaggcagtcaattgcctgatgccgacgatcgcgctggaaaaaatcatccgtggtaaacgtactacggtcagcgagcccctgttcccaaactatctgttcgtcgaattcgatcccgagatcattcataccaccaccatcagcgctacccgaggggtgaacagtttcgtccgttttggcgcccaaccggcagtggtcccttcagaggtgattcaccagctttccatctataaaccggaaggtattaccgacccggaaacgcctcatgaaggcgacagcgtgttaatcaccgacggtgcttttgaagggctgcaggctattttcaccgagcccgacggcgaagcccgttcaatgctgctcctcaatctgttgaataaacaggtcctgcaaagcgttaaaaataccgacttctataaaatctgacggcgcggttaaaagcgcacgccaaacagcttcctgacgttcgcatccgtaacctcctccagccattgcgcttcctcgcctcgccagcccgctacgcttgccagaatatgcggcagataagcgggctcgttgcgccgcgaggagggcttcggcttcatatccctcggtaatagatatggcgcatcggtctccagcagcagacgttccgccgggatcgccggcaacagttcacgaagctccagtccccgccgctcatcgcacacccaaccggtgataccgataaataaacctctatcaagacactgaatcacttcctcgcggctaccggtaaagcagtgcaacacggcgccgggcagtttattgagccacggctccagcagctcaagaaaccgttgatgggcgtcgcggcagtgtaaaaataccggcattgagagctcggccgccagcgccagctgggcgctgaatgccttctcttgttcctgcggcgttgagaaattacggttgaaatcaagaccgcattcgccaatcgccgccacctgcggctggcgggccagcgcgtggatttcttcggccaccgactcagtccaggtgctgctatcgtgcggatgtacacccgcagtagaccagcagttggcgtaacggccagccatctgccgcgcctgctggctttcatgcagattggtgccggtcagcaacatcccatggacacctgccgcctgcgcgcgcgcaaccacctcgtcgtggtcgcgggaaaactgcgagctggtgagatttacgccaatatcaaacatcataactcccatatgacaaccgccctgacgggcggttggcgttgttactcttctttgctctccgcctcttcggcggcggcatcttcgtcacgcgtcaggcgtttaccggtgtagaaacgggcaaagaacaccccgacttcaaacaggcaatacatggggatggccaacagcgtttgcgagaacacatccggcggcgtcagcaacataccgaccacgaaggcgcccaccagcacgtagggccgttttttacgtaaatcttccggcgtcgtgacgcccatccagcagagcaggacgatggcgaccggcacttcaaacgacacgccgaaagccataaacagcgccatgacaaaatcgaggtagctacggatatcggtcgaaactaataccccttccggcgcggcgtgagtcaggaagccgaatgccagcgggaacacgacgaaataagcgaaagccataccgatataaaacagcaacgtactggaaaccagcagcggcatgaccagccgacgttcatgcttatacaacgccggcgccacgaatgcccatacctgataaagaatgaccggcaccgacaggatcaccgagaccataaaagtcagtttgatcggcgtgaagaaaggagaagcgacatcggtggcgatcatcgtcgcgcctaccggcattttgctgataagcggagcggataccagttgatagatatcattggcgaagtaaaccaacgccaggaagatcaccaggatggcaatgatgctgttgagcagacgcttacgcagctcaatcagatgtgaaattaacggttgagtctcgtctacgcccattttttacgctttatcactcgatgcgggggaagaatctggcactgccgcggcggctttttccttagccgccgggacttcagccggcgaaactgatggctcctcggcaacgggccccggggtatgtgccggggcgctgacctgatgttccgccgttgccggtgtaacatcctgacgctgcgcttcgctacctttgacgaccggattatggatggtgttcgcttcgtcgctggccttttcaggatcgtgggcggtataggaacgcttcatagattcagctgcttcacgcagttcgtccatcgaggctttgagctccggagtcagattatccaggctggctttctccacctttttcaggctctcctgaaactcctgcagttttagctcctgggcaagctcattttgtacggtggtcgccagcgagcgcaacgtacggatccagctggccaccgttttgacggcgacaggtagtcgctgtggccccaatacgatgaggccaatcacgaacaccagcaatagttcactaaaaccgatatcgaacacgaattacacctgctctttgtcgtggcgttttgtctcgtcttttttcgcatcatcttgtttatcagcgatagttttcgctgcaaaatctgcatcggctgaggatttatcagatttctcatcatcgctcatcgcttttttaaagcccttgatcgatgcgcctaaatccgaacccagcgagctcagcttcttcgtcccgaaaagcagaactacgatgacgacaacaattaacaactgccaaatactgataccacccatacacgttcccctatgacagatgatgaatgatgagagcgcattatacacgtcatccggtgagacgcctctttgtcagaccgctcacatgacttcgcgcaagaatcaatgcgccagaataaacgcgaaacctgtcagcgcgtttttcgccaaccaataagccaggttacgacgccgccggccatcagccagcctggcatcatgccccactccgggcggtggataaataacagcgtaccgcttaaaagcaaaacggcgcctataccaaacagatagcgggactgcccctgacgcacgtgacgcacctggaagtcgcgcacgatagtatcgacgctggtctgcagctgtttgctctgctgcaggctttggtacaccagctcaggaatttccggcatcctttcaatccagaacggcgctttttctttaaacgcacgcaccagcgcgggaataccgacctgatccttaatccacgactcgagaaaaggcttcgccgttttccacaagtctaactgaggatagagctgacgacctaccccttctacgtaaagtaatgtcttctgaagcaaaaccagctgcggttggacttccatattgaaacgccgcgcggtgttaaacagattcagcaatacgtggccgaaggagatttccgccagcggcttttcaaagatgggctcgcacacggtgcgaatcgcaaactcaaactcttcaacgttggtatccggcggcacccagccggaatcgacgtgcagctcggcaaccttacggtaatcgcggttgaagaaagcaatgaagttttctgcgagataacgcttatcgtctttgttcagcgagccgacgataccgcagtcgataccgatatattgcgggtcatgcggatgatcgtagctaacgaaaatattacccggatgcatatccgcatggaaaaagctgtcgcgaaacacctgggtaaagaagacctgcaccccacgctccgcaagcaactgcatgttggtgccctgggcttccagcgcagcgacgtcggaaaccggaataccgtagatccgctccatcaccatcatgccttcgctacagtaatcggaatagacttccggcacgtatagcattgggctatcttcgaaattgcgccgtagctgaatagcgttagccgactcgcgtaacaggttcagctcgtccatcagcgttttttcatattcgcggacgacttcttgcgggcgcagacggcggccatccggcagcagacgaggtacccagcgcgccaggcggtagattaatttcatgtccgctttgatcaccggcaggatatccgggcggatgaccttgatgacgacctctttgccgttgtctttcaggcgcgcggtatggacctgggcgatggaggcggaagcgagcggctcaatggcgaaatcatcgaaccaggcttcaatgggcagcccacccatcgcttgttcgatctgttgtttagccaatttgccatcgaaaggtgcgacgcgatcctgcagcagcgccagttgatcggcgatttgcggcgggaacagatcgcggcgggtggagagcatctggccgaacttaatccacaccgggcccagctcctgcagcgccaggcgtaagcgttgacccagcggtttatctttgtggcgattcggcatccagaacaacattcgccgccagatgcgcagcggcaatgtgatacgcattttgggaatgagctcatcaagcccgtaactcaaaaaggtgcggatgataaaatacaggcgccgtaattctcctggcgtcatttgccctccagcgtttccagccgtttttccagtgcggccagcgcgcgttctacagcggcggactcttcagcaaaccaggccatttccaacggccccggcgccagtcgccactcttcggtaatcgcttcagcgacgtagcgctgctggcttttcgcgccctgcagcaggaagcgcgcgccgccgcgaagcaccttgccaaccccttcagcgacgatatcgccggtatacggcgccaataactctgccgggtcgaactccgccagatcgcaaagtgcgaccatgttctgcacaacctgcaggtcgccctgtacttccagatcgccgctgcggatcagcgcggtcagttgttggcggttacgcagctgcggcagcacgctcaggcgggttatcacggtacagtcagcttcgccttcccacgcgccgagcacgtcgatttgctgctcgctataggccagcacgacaggcgccgacagctctttgagctctacgcgcagcactttccccagcaggcgctgacgcgccggtttaagcgcgcggtcgcgccagagaaaagtattaagaaccgtttcgatgccagcggtaaccagtggtgcgaaaggcatagcgtccctcctgtcagaacttatagccgcggtgtagcgcgacaatacctgccgtcaggttgtagtagtcgacgctttcaaaacccgcctcctgcatcatgcctttcagggtgtcctgatcgggatgcatgcggatggattccgccagatagcgataactttccgcatcgtttgccaccagctcgccgactttcggcaacacgtggaaggagtaagcgtcgtaggctttgctcagcggttcgagaatcggtttagaaaactccagaaccagcagacgtccgcccggtttcagcacgcggtacattgaacgcagcgctttgtctttatcggtaacgttacgcaggccaaaggagatggtgatgcagtcaaaggtgttatccgcaaacggcagcgcttcagcgttggcctgaacatactcgacgttaccgacaataccgatgttgcgcagtttttcgcggcccattttgagcatcgaatcattgatatcggcgagcatcacgcggccggtttcgcccaccagacgggaaaacttcgccgtcaggtcaccggtgccacccgctaagtccagcacagtttgcccgcgacgcacgccgctgcagtcgatggtgaagcgcttccacaagcgatgaatcccgaacgacattaagtcgttcatcacatcatattttgcagcgacagaatggaatacatgcgccaccatgtccgccttctgctctttggctaccgtttgaaagccaaaatgcgttgtttcttgtgaatcctcaaccatctctatgcccgcttacttatcaagaaaatgttcagcgagtgtaacagattcaggccatttcccatacgtttcagcttggcctgacgtgctcgtttgcgctcgctgcagggtcggaatcggcgctaaacacatcttcctgcggtgaattttcatcttcctcaaggcgatattcgttatcctgcgccgtggcctgctcgactaaatcaggattaatcccgcgcttaacctcgacccccaggccacggaatgactcggcctgcaccagcaagttgccgcgcccggaggcaagctttttcatcgcctggcgatagttatcctgcgctttatcaaggctttgaccgatagccgacatatcgtcgacaaacagccgcatcttgtcgtacagacgcccggcgcgctcggcgattttttgcgcgttacggctttgatgctcatagcgccacaagttggcgatggtgcgcaacgccaccagcaaggttgtcgggctaaccagcataatattgttcttcagcgcctcgctgataagctcaggttggcggtcgatagccagcaggaacgcaggctcaacggggatgaacatcagcacatagtcgagcgaacgaagtcccggcagttgttggtaatctttacgccccagcaggcgaatgtggttacgcaccgaggcaatatgctcctgtagcgccgcttcgcgggtgtagtcgtcgtcagcgttgaagtagcgctcataggcgacgagggtcattttggcgtcgataaccacgtctttgccctgcggcagacgcacgataacatccggctgcatccgcgagcggttatcggtttcgatgctcacctgagtttgatactcatagccttcgcgcaggccggaggcctccagcacgcgggttagcaccacttctccccagttgccctgagttttgttatcacccttcagcgctttcgtcaggttcagcgcctcttgcgccatctgtgcgttcagctgttgcaaattgcggatttcgtgcgccagcgtgtggcgctcacgcgcctcctggccgaagctgtcctgcacctggcgacggaagccgtcaagctgttcgcgcagcggcgtcagcaggccatgcaggctctggcgattttgttcatcaacccgtcggttgctgtgctcaaatatgcggttcgccaggttttcaaactgctcgctcaggcgctgctcgctgttgaccatctggcgaattttatcttcggcgtgcaactgcgtggattccagacgggtggtcacttcacgcaggtcggcctccagcgaggtgttgatatcacgcaggctgcgcagctcgttgttgagaagttcgcactcatcgcgccagtgcgattcctgcaccagctgctgacgtgcggcgctaagttcaatatccagctcgcggcgctcttcaatgagatcggcacggatttgatcggcgcgggcttttgtcgccagccagccaacgattaaccctgccgccagcgccaccacggcgcttatcacaatagagatatccacaacgcctccccggcaaccacttacggcacaaaaatagaattgtgctgtacaaacgtccagttgaaaaggattttcctgcgaggcgctacgcaaaaaaaaggccggaagatccggccctgtgagaaaaagagaagaactacagcagacggcgcgccgcttccacaacgattttcaccgcgtggctttcggtttgcttcatggtttcggcgttagggatctcttgctgggtacggttgacgataacccctgccaccatcccggcgcgcagaccctggctggcgcacatggtcagcagcgtagcggattccatttcatagttcatgacgcccattgcctgccactcttccatcgagcctttgaaacggctcacgacgcggccggagaaggtgtcgtaacgctcctggcctggatagaaggtatcagaggaggcagtcacgccgatatgcgtggtcgcgccgattgatttcgccgcttccaccagagcggtggtacaggcgaagtcagcaacggccgggaactccatcggcgcaaagtgcaggctggcgccgtccagacggacagaaccggtcgtcaccagtacatcgccaacattgatatgtggctgaatcgcgccggtggtaccgatacgcaggaaggtacgaacccccagctgcgccagctcttccacggcgatagaggtcgacgggccgccgataccggtagagcaaacaatcaccggtttgccgtccagctcagcgcgccaggaggtaaattcacgatgtgatgccagcttaaccggcttatccatcagcgcggcgatcttttccacacgctccggatcgccagggacgatagccagcgtagccccttgtaaatcgttcttagtgaggccgagatgaaaaacatcagacttggacataaaaaactcctctgtgggtcgaagtatcagcagaagcaaaagggtactttacagaagccactcgcttatttttgtgatgatagtcaccatgcataataatgattgcatttgtttttcaacaaatagtgatttacatcacattaacaagttatattcgcggtcacagaacaaaagatagccgctttcaggcactgtgctttattaacgttcagtctaagagtctatatttatcgatgcgctaataaataagggtacggagaataccatgaccaccaccaagcaacccggattcgcacctgcagcctcgccgcacgcctctaccgccgtccatacgtcggatgagcacattaccgccggagaaacctcgatcccatcgcagggcgagaatatgccggcctatcacgcccgcccgaaaaacgccgacggcccactgccgatcgttatcgtggtgcaggaaattttcggcgtacatgagcatattcgcgatctgtgccgccgcttggcgcaggaaggctatctggcgattgcgccagaactctacttccgccagggcgatccgaatgagtacaacgatatccctaccctgttcaaagaactggtcactaaggtgcctgacgcacaggtgctggcggatctcgaccacgtcgccagttgggcggcacgccacggcggcgatgcccatcgtctgctgatcaccggtttctgctggggcggtcgcatcacctggctgtatgccgcgcataacccgcagttgaaggcaggcgtcgcctggtatggcaaactggtgggagaaaaatcgctgaattcgccaaaacacccggtggatatcgctgtcgatctcaacgcgccggtacttggcctgtacggcgctaaagacgccagcattccgcaggataccgtcgagaccatgcgccaggcgctgcgggcggcaaatgcgaacgccgagatcgtggtctatcccgaggccgatcacgcctttaacgccgactatcgcgccagctatcacgaagagtcagccaaagacggctggcagcggatgctggactggtttgctcaatatggcggtaaaaaagggtaactcgcctgatacatgaaatgaggaggccgtggcctcctctgttgttttccgcgtatctatcaggctgattcgcgcagattctgcgccgcttgcaccatgttagccagcgcggcgcgggtttcaggccaaccacgggttttcaggccgcagtccgggttaacccacaagcgctccgccggaatacgctgcgcggccttctccagcaacccttcaatccactccacgcttggtacgtttggcgagtgaatatcataaacgcccgggccgatttcgttcggatattcgaactcttcaaacgactccagcagttccatgtcagaacgcgaagtttcaatggtgatgacgtcggcatccagcgcggcgatagaatccatgatgtcattgaactcgcaataacacatgtgggtatgaatctgggtgtcatccttagcaaccgcggcgttgatacggaaagcttcgacgccccactgtagataagcatcccaatcactgcgcttcagcggcagaccttcgcgcagtgccggttcatcaatctggataataccgataccggccgcctccagatccgccacttcatcgcgcagcgccagcgcaatctgcttcgcgatggtttcacgactgacatcttcgcgcgggaaggaccagcacagaatggtcaccggaccggtcaacatgcctttgaccggcttgtcggtaagagactgcgcgtacttcgcccactcgacggtgatcgcttgcggacggctgacatcgccgataaccaccggcggcttcacgcagcgagagccatagctttgcacccaaccgttttgcgtgaagatgaaaccgtccagatgctcaccgaaatactccaccatgtcgtttcgctcggcttctccgtgcaccagcacgtctaaacccagacgttcttgttcgacgatcgcctgcttaatatgttcggcaatacccgtccgataatggctggcgtcaagattgccctttttgaagtccagacgtagggtacgaatttcggttgtctgcgggaatgaaccgatcgtcgtcgtcggccatgttggcaggttaaagcgcctgcgctgcgcctgtgcgcgctcggcataaggactggcgcgctggctgtcctgagcagtgattgccgccagccgtttttccactgccgcgttgtgtacgcgagtcgaatggcgacgagcctggattggcgcgctccacgcctcgatcgccgtcgtattaccgctgttcagcgcatcgcgcagcagcgccagttcgccgcacttctgcagggcgaaagcaaaccaactttttacttcggcatcaagacgggtctctacgctcagatcgatcgggctatgcagtaaggagcaggaagaggcgacccataattcgcgttgaccgacaatcgccttaatttgcgcatatttttccgtgagatcggcgcgccagacgttacgaccgttgatcagcccggcggataacagccagtcggccggcaggcgtttatgtagttcagcaacatcatctttgccatgcaccagatcgacgtgaagcccctgtaccggcagcgcggtgataatatcaaggttgtcggcgatcccttcaaaataggtagtcagcagtagttttacctgcccctgcagggcctcataagccggtttaaaggcatccaaccatgcttgcggcagctccagtaccagcgccggttcatcaatctgcacccactcaatgccgcgtttcgccagctcgcccagtacctgctggtaaaccggaaggatatcgttcagcaggcttaaacggtcaaactgttcgccttttactttgcccagccacagatacgttaccggccccagcagtacaggcttaatcttgtggcccagcgccagcgcttcgtccacttcatccagcagttgggtccagctcagcttgaactgctggccctggacaaattccggcaccatgtagtgatagttggtattgaaccacttggtcatttccgcggcggcagcgggttcgccggtcggcgcgcgaccgcgaccaatacggaacagagtatcgatatcgacggtgccgtctttgttctgatgacgagccggcacgttgcccaacagcaggctggtggtcagaacatggtcgtaccaggcaaaatcgcccaccggcaacagatcaatgcccgcctgtttctgctgctcccagtgacgagcgcgcagttcgcgacctaccgccagcagatcttcacgcgtggccttgcccgcccagtagctctcttgcgcttttttcagctcgcggcgaaggccaacgcgaggaaaaccgagggtgtgattgaggattgtcatgttatgccccttatggaattttttgcatttagccatccagatgtttacacatccataatgtaaaggtactgtatattcctcaagcgcaaattattcatgccgaagtgaaggacattcatgatcgagattaagcacctgaaaacgctacaggcgttgcggaacagcggttcgctggcgggcgcggcggcagccctgcaccaaacccagtcggccctgtcccaccagtttagcgatctggaacagcgccttggtttccgtttgtttgtgcgtaaaagccagccgctacgcttcacgccgcaaggagaaattctgctgcagttggccaatcaggtactgccgcagatcgctcgcgcgctacaggattgcaatgaaccacagcaaacccgtctgcggctggcgattgagtgccatagctgtattcaatggctcaccccggcgctggaaagcttccgcgcccgctggccgctggtggaagttgattttcagtccggcgtcacttttgacccgcagccagccctgcagcagggtgaactcgatctggtgatgacctcagatattttgccgcgtagcggcctgcactattcaccgatgtttgattatgaagttcgtctggtgttagctccggaacatccgctggcggcgaaaacgcgcatctccccggaggatctggctgcggaaacgttactgatttacccggtacagcgcgggcgactggatatctggcgccacttcctgcaaccggcggggatcagcccacagttgaaaagtgtcgataacacgctgctgttgattcagatggttgccgcacgaatgggtattgccgccctgccgcactgggtggtggaaagttttgaacgccagggtttgattgtcaccaaaaccctgggagaaggactgtggagccggctgtatgctgcagtgcgcgatggcgagcaacgccagccggtaacagaagcgtttattcgctcagcgcggaaccacgcttgcgatcatctgccgtttgtacggagtgcggagcgacccagcggcgatggacccatagcgaagccaggattaccagcgcgccaatgataaagcttggccagtgaggctgctcctgccagatagcgagattaaccaacagcccggcggggacgtgaacgttattcatgatccccaacgtaccggcatccacctgcgtcgcgccgtagttccacatgaaataacccaatccggatgcgaccacgccaagccagaccaggattccccactgcaggccggtagtcggtagcctctgcggattgcccagcataaaccacgccgctaccgccacaataaaggcgccggcatagaaccaggcaaaagcattgtgttgcggcatcgggcggacttccatcaaacgcttgtagcccaccatgccgatggcgaagcagatattcgacaactgcaccagcaatagcccggtccagaaatgatcgctgactttgtcatagcggatgatcgccgcccctaacaccgccagcgccgcgctaagcagatagccccagcgcagcttacgaccgctgagcagatcgtaaatcagggtgatatacagcggggtaaagaccgtaaacaacagaaattccgagaccgtcagataaagataggcgcggaaagccagcaaatacatgatgccaagctgcatcgcccccactagcatatagagtacgatggtgcgcggagactggccgcgcgtacgcaggaaaggcaaaaacaccagcgctgccaggcccacgcgcatcagcacggaaaaatagctatcgacgctaccggcaaggtattcgccaatcaggctaaaagaaaaggcccacaggatagtggtgataattaatagcgccacaatggtcgtctcattgaataaagaacaggcattgtagcggagagagaggttgacgactgaccagttattagccagtcgtcaatctttatcaatcgaggtacaatttgcgcaggtaatgcggtacggcatcatcggcgttgctgccgatcacttccagctcaggatgcaaatccttcaaccgctgatgggcgttcgccatgatgcagcctttaccggccatcgacagcatctcggcatcgttcatgccgtcgccaaaggcgatacactctttgaggctgtagccgagcattttcgcgacggcctccagcgcatgccctttcgaaacaccgccggccatcacttcaaggcaggtcaatgtggagaaactcacattcacgcggtcgccccagcgcgcgttgatagcctgctcaagcggcagcagatgttcatgatcttcacaagtgaagaaaactttgctgatgccatccgcatccagctcgcccggttcataaagcttgtagttgaacaccgcctctttgaagaagcgcatctcttctgggcgatggcgattcataaaccattcatcttcacgatagacgttggtcacaatcttcacatcgttacgcaccatctcaaacagatcgctggcgatatcgcggtcgaggttatgggcgaagatttgttttccttcgctatcgtgtacgcgcgcgccgttagaggtgatcatgtacgacttaatgccgagattatcgcggatctgccccacatcgatgtagtggcggccagtggcgaaaacgaaatttatcccgcgcgcggtgagtagcttcagcgtctctttggcatagggggtgaggaaatggtcgggggaaagcagtgtgccatctaaatcagacgcaacaacctggtacataaaaaatttaacctctaagcagggcgacgagatctatcgtcggattaagtatgtcgattgaaaaaatcaacgatggcatttagcgcgactgagcgcatagcgtccttttcaaaaaggatctcgtgatatgccccttcaataacgagcggcttatcgccttcacaagggtgcccggcagcggaacggagttcacaatagcggtcgtgcatcaggttatcgaccaccttttcatcctcggcctgaatcaataacgtcggagtcgtatctttctcgacgccagacaatatctcttcgccggccagaataccttcgcgcacccagtgataggtcggcccgccgacgcgcaaccgcggatcgtcggcataaaaacgcaggttgcgacgatagcgctgacggctatgagtcaacacattgagcgaaaacggcagcgcccgccagcggcccgtaccgatggcatactcttcacgaatacgctgatggccctcagcccagtcgagaatatggcgcaccatccagtccggcaggcgcatgatgatgccaaacattggcgcgcataaggcaatggcgtcgcaatgctgctggtgacgctgtaagaacagcgtggcaatggcgccgcccatcgagtgggcgagaataaaacgtttacgccagtggccgggaaccacttcctgctgccagagcgcagccagatcgtcaacataatcgctaaagcgcacaacatgaccgcggtgggtatctgacagcaacctaccggaacgcccctggccgcgatgatcgataatcatcacgtcaaagccgctgtggaagagatcgtaggctagttcggcatacttcacgtagctttcgatgcggccggggcaaatgaccaccagccggtcgttatttgcggcacaaaagcgcacaaagcgtaccggaaccttatcgacgcccgtaaattcagcttcttcccgctgatgccagaaatccgtcagcggccccatggtaaaggccgcaaacgcgttttctcgtgtgtcccagtccttttgctgcccaaacatcgggtttacacccctgttaaccgctgaaaatcgtttttttgtcgcacatcacacaatgctgatgcaatagcgtattgtggcataaaaatagacaatcagggagattctcatgaccttcgagtggtggttcgcttatctgctgacatcaatcattctcagcctgtcgccgggttccggcgcgatcaataccatgaccacatccatcaaccacggctatcgcggcgcggcggcctctattgccggcctgcaaaccggattggccattcatatcgtgctggtcggcgtcggtctgggcacgctcttctcacgctcggtactggcattcgaagtgttgaaatgggcgggcgcggcctatcttatctggctggggatccagcagtggcgggcggcgggttcaattgacctgaatacgctggcgcgaactcaaagccgcggtaagctctataaacgcgcggtgttcgtcaatctgaccaacccaaaaagtatcgtcttcctcgccgcgctgtttccccagttcatcgtcccgcatcagccacaggtgatgcagtacctggtactcggcgtcaccaccattgtggtcgatatcattgtgatgatcggttacgcgacgctggcgcagcgcattgcggcctggattaaaggtccgaagcaaatgaaggcgctgaataaagtgtttggctcgctgtttatgctggtaggggcgctgctcgcttccgcccgtcacgcctaaaactggaatggcgctcgcatagcgcgaggccacttgcggccggagtcgtattatcacgcgtgctggcgcgcaaagatgaaagagactttatccgcgcgctgtcggtcccgccttttcagtgccagaatgccgccattgggtttattcacggatgaacgaaatggcggaaacggcaaccccacatgatgcagtctttaagacctttctgtcgcgggtcgaaacggcgcgcgattttatcgagatccaccttccaccggcgttaattcaggtttgtaaactggatacgctgcgcctggaatccgggagttttctggaagatgacctgcggccctactacagcgatattctttattcgctggagacaaaccgcggcccggggtatatccatgttctgatagaacaccagagttcacctgataaactgatggcgtttcgtctgatgcgctacgccatcgccgccatgcagaggcatctggagaatggtcataaaacgttaccgctggtaattcccattctcttttatcaaggacgtcgcagcccctatccctggtcgctgaactggctggataattttgacgactcgatgcttgcccatcagctctattcaggtgcatttccgctggtcgatattacggtgatccctgatgacgaaattatgcgccaccgcagtatggcggcgcttacgctggtacaaaaacatattcgccagcgcgatatggcacagctgcttgacaagttgacccacctcttaatgttggagcagatgagcggacaacaaatcgccgtgctgataaaatatatggctcaggcgggagaagctcaggatattcgggcgctattttatgggctggcacagcgtgtgccgcagcatggaggaatgctaatgactctggcagaaacgtggctcgcagaaggcagagagaaaggtatcaaagaaggcatcaaagaaggaaaacgacaggcccttttacaggtcgccgcagcgatgctcaatcgcggcttggatgacgatgctatcctggaaatgaccggtttgaccagggatgaactacagcgccttcgtcactaatgtctgccccacccggcaacaaaccgggtggataatcgcatgacgagttagcgcgaaatgatcagatgaatgccgaaaccggcaaacagggttcctgcgatgccgtctatccactttgccatccgctgatagccgcggcgcattttcggcagtgcgaacaggctggctacgatggtgaaccacgccagcgtttcaaggacgatcagcaggaaaatcccccaacgcgcaccggcgccgatgttatcgccaacgaacagtgaaaagaccgaaccgaagtagataatggctttcggattggcgagattggtcagcaggcccttcaggaaactgcgcccgctacgcgccagctcaacctgcggttccgctgccgatacatcagtttccttcaacgcgccgcgcagcatttgatagcccatccagcacagatacagcccaccgccgaccataatcaacgtatgcagccaggccattttctcgataatcagatgcaagccgagcagcgctacgcccgcccagaccattacgccgccggtgattcccaacacgcccatcatcgcctctttgcgcgagcggctcaccgcggtttgcgaaacgaagaaaaaatccggccccggactcattagcgcaatgatgtgcaccagcgccacggtgagaaaaagcatcaacatgtttaactcgcagggaaatagtgaagaaggaaactattctggcaccttttcccgcggctgactactcatcatcgccatcgacatgagcacgtatcagcgccatgaattctttaccgaagcgctcaagcttgcgggtccccacgccgttgacgctgagcatttccccggcggtgagcggcgactgttcggccatctcaataagcgtcgcgtcgttaaagacgacatagggcgggatattctcctcgtcggcgatcgctttacgtaatttacgcagcttggcgaacagcttgcggtcataattgccgccgaaggatttctgcatcgctttcggttttagcgccacgatacgcggcacggcgagctgcagcgggacttcaccgcgcagtaccggacgcgcggcctcggtgagctgcagcgcggagtgctgggcaatattttgcgtaaccagtccgaggtgaattaactgacgaatcacgctcacccaatgctcgtggctctgctcgcgaccaataccgtacaccggcagtttatcgtggttcaggtcacggatacgctgattgttggcgccgcggagtacttcaaccacatagcccatcccgaagcgctgattcacccgataaatagttgaaagcgccttacgcgcgtccattaagccatcgtactgctttggcggatcaagacagatatcacagttgccgcacggctcctgacgcccttcgccaaaatagttcagcagcaccagacggcgacaggtctgcgcttcggcaaaggcgcccatcgcattcagcttatgacgttcaatatcctgcagcggcccggcgggcttctcctccaggcagcggcgcagccacgccatatccgccggatcgtaaaacagcatcgcttccgccggcagcccgtcacgcccggcgcggccggtttcctgataataggattcaatgttgcgcgggatatcaaagtgcaccacaaaacgcacgttcggcttgttaatgcccataccgaaggccaccgtcgccaccacgatctgcagatcgtcgcgctggaatttctcctgcacgtcggcacgaatatcattttccagaccagcatggtaggccgccgcgctgatgccacggctttgcagcctggcggcggtgtcttcaactttagaacggctgttacagtagataatccctgatttaccgcgctgatcctggacgtaacgcatcagctgatcgaggggcttaaatttctccatcagcatatagcggatattggggcgatcgaagctactgacctgaatcagcggatcgttgagccccagcaggcgaacaatatcacggcgggtggtgtcatccgcggtggcggtgagcgccataaacggaatatgcggcatccgctggcgcagctggcccaacgcggcatattccgggcggaaatcatggccccactgcgagatacagtgcgcctcatctaccgccagcatcgctaagttccagtggctcagatgctcgagaaagttgtccagcatcaggcgttccggcgcgatatacagcagacgaatctgcccgctgcggcagcccgccatcacttcttgctgctgctcgcggctttgcgttgaattaagacaggccgcggcgacgccgttcgccagcagctgatcgacctggtctttcatcagcgaaatcagcggcgacacgacaaccgtcaggccgccgaggaccaatgcaggtacctggtagcacagcgacttaccgccgccggtcggcatcactacaaggcaatcgcggccttccagcgccgtggcgatgatcgattcctggcccgggcggaactgctggtagccgaaggtctcttgtaaaacctgcttagccagcgattcctgatttaatacttccgcctgtgccacgttgaccccattcgcctgaaaagaaaacaggcgctattttcagcgcctgcgagccagagtgcaacgattaaaacagatcgttgagcatcacgccgacgccgacgcgcgtctgattgaagttatagtcgattagtgattcgccataaccgctgtagatttgagtataggcgcgcacatgtttggtaataggataactgaccccgacttccgcgccgccgtagccggtattccagttatattgcccctgagcgctaagaatagcctcccccagctggtagccaatcttcaggcggtagtaacccatgtatttggtgatatcggggttatcatcggtgctgccgaccacataccacggcttcacttcaaccagccaattaccgttttgcgccatcaggcgagtatacaggcggttccagctacgtgacgttggatcggaacggccgttagagtcgtggttatagccgacttcgatatcgcgcaaggtccagccggcaaactcataatccgtcgcgaagccaaggaagagctgaggctcgtagttggtttcgcgaaacggcgccgagcctttactgttagagagctgccaccaggatttttgcgtataggaggcgccaagcagcgaattatcgccgagaataccgcgccacaacgggaacgccaggctgagctggaacttcacctcatccttacgcgcgtcatcggcccagtcgtaactacgaattgcctctttattgagatcgctggtccatgtatagagcagatagttgctctcataaggataaagcaggaacggattatcatgatcctgcagcaggttggcgataatactgccccgtaccgcgggtttgtcatgaacggtttgttcaatcggcgcgtcctgcgccagaacgcctgctggtaacgcgctaagcgccagcagccaggctaaagagatacgcattactgttctcctgatgaatggctcttattaatgttttgtcctgctgccattctacctatttatctacctcccgctgcgttatcgcctccgaaagtggaaatcaatatttttgaagcataaaatcaacatttcattaacgaatggacctctgctatgtctgaactgaccgccgccgccgcgctaaagctggtgggagagatttttgtttatcatatgccttttaaccgtgccctagggctggaactggaacggtatgaaaaagagtttgcccagctcagctttaataatcagccgatgatggttggcaactgggcgcagagtattctgcacggcggcgttattgcgtctgcgctggatgtcgccgcggggttggtctgcgtcggcagcaccctgactcgccatgacaccatcaacgaagaagagctgcgccagcgtctctcgcggatgggaactatcgatttgcgcgtcgattatttacgccctggccgcggcgaacgcttcaccgcgaccagcagcctgctgcgtgccggaaacaaagtcgccgtggctcgcgtcgagctgcataacgaagagcaggtttatatcgccagcgccacggccacctatatggtgggttgattgccgcagatcgagtaacatcactctctttggcaatggattctaccaatggacgcaaaacaaacgcggctgggcgttatgctggcgctggccgcctattttatctggggtatcgcgccggcgtacttcaaacttatttactacgttcccgccgatgaaatcctgacgcatcgcgtgatctggtctttctttttcatggtggcgctcatcagcgtcagccgccagtggccgcaggtaaaaaaacttctaaaaaccccgcgcaagatcttcctgctcgcgctctctgcagtgcttgtcggcggcaactggctgctctttatctgggcggtcaataaccaccatatgctggaagctagcctcggctactttattaacccgctggttaatatcgtgctcgggatgattttcctcggcgaacgctttcgtcggctgcagtggttggcggtgatcctcgctttttgcggcgtgctggtgcaactttggaccttcggctcactgccggtaatcggccttgggctagccttcagctttgccttctacggactggtacgtaagaaaatcgccgtcgatgcgcagaccggcatgttggtggaaacgctatggctgctgccagtggcggcgatctggcttttcggcatcaccgatagcccaaccagccatatgggagacaacccctggtcgctcaatttactgctgatggccgcgggcgtggtaactaccatccccctgctgtgctttaccggtgcggcgacccgcctgcgcctgtcaacgttgggctttttccagtatattggtccgacgctgatgttcctgctggcggtaacgttctacggtgaagtgccgggcacggataagatggtaaccttcgcctttatctgggtggcgctggcgatattcgtgatggatgcggtatatacgcaaagacgggggcgccggggataggatattacccgatgtcggctacgccttatccggcctacaaaagcacaacacgtaggcccggataagcgaagcgcatccggcacaacaactacagccagtttttacgcttgaagtagagatacggcgccaggcctgccaacatcataaacacgatagctcccggataaccaaagctccagtgtagttccggcataaactcaaagttcatcccatagctggacgccaccagcgtcggcggcaggaacacgaccgaaaccaccgagaagatcttgataatgcggttctgctcgatgttgataaagcccatcgccgcctgcatcaggaaattcaccttctggaacagcgattcgttgtgcggcagcagggattcgatatctcgcaggatctctcgcgcctgttcaagctggcctgccggcaggcgcgccttgcgcacgaggaagtttagcgcgcgctgggtatccatcagacagaggcgaaccttccagccgatatcttctagttccgccagcgtcgacagcgcttcgtcgtactcgtcgccctggtggccttccataatcacgcggctcagcttttccaggtcactgtagatgttttctatctcatccgccagctgttcgattttggtctcgaacagatctaacagcagctcataggcgttgccgtcgaccagcgtctggttacgcacgcgcatgcggtacaggcgaaaagcgggtagttcacgctcgcgcaatgtaaacaggcggccttcgcggatggtaaacgccacggttgagttaccggcgtgatcgtcggcatcttcgaaaaagaaaaaggagtggatgtgtaaaccatcttcgtcttcaaagaaacgcgctgacgcttcgatgtcttccagctccgggcgcgtcgccaggttctggcctaactccgtttgcacacggctacgttcgtcatcgtctggctcgaccagatcgacccacaccgagctggcgagatgcttgatctcatcggcctcaaggcgcgttaaacgattattttccagttgaaatgcgctcagcatgaccgggactcccaatacaaaaaatttatcggacagttcgatgggcacacagaaactatttgggtttcagaccattaagcctgactcagagcgacggggataggacgagtcgccgacaaccgctaaggctatcggcataaggggatagccttaggagttgttcctgaatgacaggaagttgagccagcatctactgggtgtgtccaaggcgaatgtcctcttagcgtaatcgtgcgcgcatgttacgccagcgccaaaacggcgtcaacacgcaagggaacgctaaagagcaaatcctgccctttagcatataaggctagcagattattacaaaaaaaattatatttttcttaaagttacaccgtttccagccgggcataggcggcaaccagccatttaattccctgcccctggaatgccacctgcagccggctatgttcaccgctgccctcaaggtttacgatggtaccttcgccgaacttcggatgccggacccgctgacccagtttatagccggtatcgttctccgccaccggggtaccgaggcgctgatggttaaccgggcggctcaccgtcgcccgtaaccgcacctcttccacgcactcttccggcagctcgccgataaagcgcgatgggcgatggtaaacctctttgccgtataaacgacgggtttcggcgtaggtcagcgtcagtttctgcatcgcgcgcgtcacgccgacgtaggccagacgacgctcttcctccagacgaccgccctcatcaagcgccatctggctcgggaacatcccctcttcaacgccgacgataaacacctgcgggaactccagcccttttgccgagtgcagagtcatcagctgtaccgcatcctgccaggtatccgcctgcccttcgccggcttccagcgcggcgtgggagaggaacgcctgtagcggcatcagatcttcatcttcttcgttgtagctgaactggcgcgtcgccgtcaccagttcctctaagttttcgatgcgggtctggcccttctcgcctttctcctgctcgtacatcatacgcaggccggaatctttaatgacccggtcagtctggacatgcagcggcatatcggcggtttcctgcgccagcgcgtcgataagctccataaagcgctgcagagcgctggcagcgcggccagccagcgctttctctttcagtagctcgcggcaggcctgccacagcgtcagctgacgatcgcgcgaggtctggcgcaccacatccagggtacgatctccgataccgcgggtaggcgtattgactacgcgctcaaacgccgcgtcatcgttacggttggcaatcaggcgcagataagagagcgcatctttgatttcctgacgttcgaagaagcgcatgccgccgtagatacggtaaggcatgctggcctgtagcagcgcctcttccagcacgcgcgactgggcgttgctacgatagagaatggcgcactgctccagcgctccgccgttctcctgccaggttttaattcggttaaccacgaaacgcgcttcatcgagatcgttgaaggcgcagtacagcgaaatgggctcgccgtcggcgccgtcggtccacagttttttgcccaaccgcccgttgttgttttcaatcagggcgttggcggcgctgagaatattgctggtcgaacgatagttctgctccagacgaatagtttccgcgcccgggaagtcattcaggaagcgctgaatgttttcgacctgcgcgccgcgccagccgtaaatcgactggtcatcatcgccgacaatcatcactttgccggtatcgcccgccagcaggcggatccaggcatattgaatgttgttggtatcctggaattcgtcgacgagaatattggtgaagcgctcgcggtagtgctgcaggatgtgcggtttgttcagccacagctcgtgcgcgcgcagcagcagctcggcgaagtccaccagcccggcgcgatcgcaggcttcctgataggcctgatataccttctgccaggtctgttcgaccgggttgccgtagctctgaatatggtgcggacgcagcccttcatctttttggctgttgatgtaccacatcgcctgacgcggcggccattgcttctcatccaggttcatcgccttaatcaggcgcttcagcaggcgcagctggtcttcgctatcgaggatttggaaatcctgcggcaggttggcatccagatgatgggcgcgtagcaggcgatgggccaggccatggaaggtgccgacccacataccgccctgggtggtgcccatcagttggccgatacggtggcgcatctccgccgccgctttgttggtaaaggtcaccgccataatggaatacggcgagcagttctccacgctcagcagccaggcgatacggtgcaccagtacgcgcgtcttaccactgcccgcccctgccagaaccagcatattggtgcgcgaggccgctacggcttcacgctgtttgtcattaaggctgtcgagcaggtaagaaacgtccattggcaccgccggaagagaaggggttccacgaacccctgttaatatatacagagttactggtgattatatcagcgaggtcagagatgccaaccgtgaaatttcaatatgcggcagcaggcggctatcggcggttttcatcaacgacgcgtcctgcggcttgatccagcaggcctgcattccacagcgaatagcgccagccacgtcggtggtcagatcatcgccgacgtgcagaatctgcccgaggggtaaatccaggcgctccgccgccagatggtacatatcggcaaacggcttggagcgaccatccgggcccgcgcgcagcacgaaacggaaatagtcattcagcccgaacagttctggctgggcgttaccgttggtgatagccaccagcggccatttctgcgccagcttcgccagcgtatcgtgcgtctcctgcggcacgtcgacgcggctgcgccagtgggcgaaattttccatcgccgcatcggcgccggctttcgcctcggcggcggagagcccggcattacgcatccctaactccagcgcgcggtggcgccagacggtgacgtcatgataaatctcaggttctgaggacaatagcgtttgtcgcagttgattaagcgcatgggcatcaaactggctcagcgccggatgataattgcgcacaaacgtcagcgattcctgcatcgtccggtcaatcaccgggcggttatcataaagggtgtcatccaggtcgaacgtcagcgcggagatcgggcccagaggtcggtaaaaacgcattatttcccccgtttagcgcgcggatgcgcggcatcgtacaccgaggcaaggtgttgaaaatcgagatgggtatagatttgggtggtggagagattggcatgccccagcagctcctgcacgccgcgcagatcgccgctcgactccagcatatgcgtcgcgaaggagtgccgcagcttatgcggatgcacgtggctattgagcccctgcttgatcccccattcggcaaaccgcttctgcacgttgcgcgctgaaattcgcttacccagcttcgacaaaaacagcgcgtcgtcatcgccgccgaacaggccgcgcaaatccagccagtgttcgatccacgccaccgcgttgcgtccaattggcaggcggcgctctttgctgcctttacccatcacccacacttcccctgactcaagatcaaggtgctgaatatcaaggttaactaactcagaaagacgcagccccgcgccgtacatcacttccagcatcgcccggtcgcgcacggcgagcgggtcgttaaggtcgatatccagaagccgattcacatcatcaacgtcgatatttttcggtaagtggcggggaatttttggcgccgcaattcccttcgccgggttagccgctaactcgccctggctgaccatccagtcgaagaaactgcgcaaggcggaaagccgcagcgccaggctagccgggcctaagcccgcgcggcggctgcgcacggcaaagctacgtacctgagcggcgtcgcactgctgccagctttttaagccagcatcatccgccagcgcgatcagcgcttccagctgacgctggtaattcgtgagcgtaatcgggctaagctggcgctctacgccgagatagcgcaggaagcgttcgacgcaggcgaatagcggggagtcggtcatgcgcgttcaatccagcgctccagcaggccgggcagcatgcgcgcaatctcctgcagtagctgcgtcccctgaccttgctgataatgttgtggatcgcggctgctgaagaacatcacccccggcgcgtcgtcatcgcccagtagcgacatcgccaccgagccgatagctttcgcatccggcagcaccaccaacagctctggcccgttcagcggaccaagatagtgacgtgcctggcccaaccgttggatacgaatgggttcgaacgcctgccggctcaacgccagatgggtgaatttagacggcgcgccgagatgccagctgtccggaaacaggcgcaccgtcgcgcccgccaggcccagctcgcgcgcccaacgatgaaagcggttgagcatttcatccaggctatcggcagacgccaggcgcgtctgcagatggaacaggcgctgaaacaggctttgattggccgtcgcctgttccatcagcagcgtcatattttcttccagcacgttgatatggttacgcgcccgcagcatatgccactcgaccagcgagatggtgccgcgcaccggatgcgggacgcggatatgctctacctgcgctgcattacgaataaagaactcaggattttgcagcagataatctactaccgcgctgtcgtcgagcgctgtggcgagttcctgctgttcttccccgatctgtttcatagatgaataaatccgtcgtagacgtgtgccgccgggccagtcatatacaacggttgacccggacctttccaggcgatgtcgagacgcccgcctggcaattccacgcgtacctcttcgccgagtaatccctgttggataccgaccgccactgccgcacaggcgccgctgccgcaggcctgcgtttcacctgcgccgcgttcatagacgcgcagacgaatatgagagcgttccactacctgcataaagccgatattggcgcgttccggaaaacgttcgtggctttccatcaccggaccgagggtttcaaccgcggcggtgtccacgttatcgacctgaatcacgcagtgcgggttgcccattgagacgacgccgcacaatactgtctgttcagccgcgcgcataatataggtcttttccgctttgttggcgcggaatgggacctgagacggctcgaaattcggctcgcccatgttaacgcgcaccagatcatcttccgttacgcttaataccatacgcccattggcggtgctcacacggatatcacgtttattggtcaggccttttaaacggacaaagcgggcgaagcagcgcgcgccgttgccgcactgcgagacttcgctaccgtcagcattgaagatacggtagtggaagtccagatcgggatcgtacggcggctcgacaaccagcagttggtcgaagccgacgccaagatgccgatccgcaaggcggcgaatcagctccggtgagaagaaaacattctgcgttaccgcatcaacaaccatgaagtcgttgccgaggccatgcattttagagaactgcattatctactccaattgcgcggaacagaacgttatcgttaatagttaacctgggtcggaccgccattatcgccgcgatcgttacgatccggcgtcgcgctctgaatgcctgggttaaccggcttggtcggcggcggcgcggttttgtccgccggcgggaaatacagcggccctttcaaaccgcagccggtcaggctgaagattgcaaacagaacggcaagcgtgggtaaaacgtttttcattgatagttgcccatgattcattcgttactgctttctatcatcgcaggagaagacgtaaaagcaagcgtttagcatctgactgcacgcgcttttgtttcgcgctatactgcggccatcttcaaaaaagcaggatagaaccatgaacgacagtgaattccatcgcctggccgatagcctgtggatgaccatcgaagaacgtctggacgattgggacggcgacagcgatatcgactgcgaaatcaacggcggcgtgctgaccatcagcttcgaaaatggcagtaagatcattattaaccgtcaggagccactgcatcaggtctggctggcgaccaagcaaggcggctatcacttcgatctgcaaggcgacgagtggatctgcgatcgcagcggcgaacgcttctgggatctgctggagcaggcggcaagcaatcaggccggcgagacggtgagcttccgttaatgaggtgtttcccggatggcggcgcatcgcgccttatccgtgctacccgacgacatagaaccgtagccctgctaagcgcaacgccagcagggaatatctccggatagcgcatcgcgccttatgcgggccaaatctacgagtagcgctgctgcagcaccggtgaggcgacagcttcctggcccggcggcaccgcggcggcaatcgcctggctgcggaacgggatcacctgcgtgcgtccgtcaacttcgactatctgatagaactgcggcaggttgaagttaatgaagctggagccgtaggtgaagcgatcgtgcgatgacgagtagaagcggctgacgtcgcgcaccagctcttctttgctgccttcgcagtggtgatagacctctgcgcggttgctttcatcgagaatgtagatgttaaagccgctatcattgttatccgcatcttcaaagaagaattgaataatcccttcgctggcgaagccatccaccaccgccggcagcttaacgtgattggtttctacctgtaccgacaggccgtggagcttgttgtgtgagatagcgccgtagaactcaatggcgttttccagcttctgcaccgaaacgttcaggcgttcaaagaacaggccccaggtctggccggagacgcgcagcgctttgaagcgcccggtatcctgacgggtactggagagacgcagttcgatgcactcggagaccatctgctgcacgcgggtgcgaataaggccgcgcagatgctggctgtagcagaacacctccacgctatccggcggcgcggcgtcctgatgcattttgccgagaatagttttcagcgcttcgatcatcgcctgctcgccgttaaagtgcagcgtacgcacttcgttccacgagttgcgatacagcaggtcgacgctgccaatcaggcatttttgctcttcgccgaagctgaaaacgtcgagcttacggaagtcgaaatgcaccacctgattgcggaaagccgccgtcgggtcatattcgaggttaacgataatcgccaggtggcgaatttcgcacgggctgtacagcgcttttggcgtcggcgccggcagacgcagcgggaagtggtgcgacacgtcggccaccatctcctgcagcttcggcaaatcgacgataccgttgcccttaataaacagacgggtgcgtgaggtcagcaggccgttaaaccaggcccaggccaccagcttattaagataacggttatattccagcggctgatggctgatgatcgattccatatccggcgcgcgattatacagataccaaccggtacggttggcgcggcccggcggcacgtggataaaggtcagattcggttccgacaggtccggtgaaatttgcgggtttaccagggtaaccttgcccggcaaggcttcaaaggccgcatacaacttacgcgtcagcacgccgatatcctgcgggctggcggagacgctgaggttattgcgacgcgcgaagcggatcagattacgatagctctgcatcatcgcgtcgagcagttcgttgtgcgctttgcgcacttcatcgattttccagttagcgcggttatcgagcatcatcagacgcttttcatcccagccccactctttcaccagctggctgaccacttcacgacgccagcccacacaggcgcgctcgcggctgagtttttcacagactttcagatagaagcagcggcgtaccagatcgagacgggtgtcgtcttcgatagcctgcagataggcggttacgcgctccagcatcatgcagtaggggtcgagaccgaatgagacaatctcgccatcgtgcaggcgctgtttaatatctttcgccaacaggcggttgttggggtattcccacgagtaggcttccagcagcagcgttttcagcaccgctttatacggggagtcgatgctcttatacagctgccacaggctggcgccgaagtactcttccgccgacagagaactgaggccaccgagatcgagccattcgtttggcgtcagcacgccctgggcatacagccccatcacgtaatcatcgtaatggtcttcttcatcgcccggcaccatattccacagaatacgtttcccggcgagacgcacggcggtgcggtaaaattcatcgagcaacaaaatatgctgggtcgaaccacagtcttcgccgccgaggctgccgctttcgttatggcggaagcggttttcgtcgatcaggaagaaactgacctcgacgccgagcgacgccgcccagctttcaagcaggctgcatttacgctgcagcagttggcgttcttcgttatccagccaggcctgatggcatacccagatatccagatcggaagagcagctttgcccgacggaagaggtactgcccatcgaatagacgccggtaatcggcagttcgcctttcggcggctcctgcgttagcaggccgcgatgcagttcgagttcgtcaagatagtggcgttgggtttcatcaggcgtgtagaggcaaatgccgcggggaacgttaccgtcaaggtaacccggcatcagcgggtgatgataatgtagtaatgtcggcagaagactgtaaacctgctggaaagcgggtcccatggcagcaagcgcgcgatccacgcgcagttggttgatggcatccagtctctgtttcagtgtctcaatatagaggtacaagacatatcgcctgatgttcaaaaatccgacgtacaatagtacggaggatttcagtatttcaacaagaaccgtcaccattcgtcatcggtgtggttgtgatgaactgctggctgacaaatggtttaaaacgtgatcaatttaacaccttgctgattgaccgtaaagaaaagatgcgctacatacaagtgtagcaccgtttgccgggtgtaaattccccactacgcttgcggcaaccgcacgcgcatgaaacgctaaaggtcatcatgccagcatcccacattaaccgtgaaactaacatccctaaagcaacaatgttaggatggctcatggtcgacaatgacggtaacaagcatgttagacaaagttttgagaattgccacacggcaaagcccgcttgcgctatggcaggcacattatgtgaaagagcgcctggagtcgtgtcatccggggctttccgttgagctggtgcccatggtcacccgcggcgacgtgctccttgataccccgctggcgaaagtgggcggcaagggcttatttgtgaaagagttagagctcgccatgattgaggggcgcgccgatatcgccgtccattcgatgaaagatgtcccggtcgaattccctgaaggcctgggattggtcaccatctgcgaacgtgaagatccgcgcgacgcatttgtttccaatcactatgcctcaattgacgcgctgccggctggcagcatcgttggcacgtcaagtttacgtcgccagtgccagttggcggcagagcgccccgatctggtgatccgctcgctacgcggcaacgttggcacgcgattaggcaaactcgataacggcgagtatgacgctattatccttgccgccgccgggctgaagcgcctgaaactggaagcgcgtattcgccagccgctctcgcctgaacaatctctgccggccgtcggccagggcgcggtaggtatcgaatgccgccttgacgatgaatggaccaaagcgctgttagcgccgcttaaccatacagagaccgccgtgcgcgtacgtgccgagcgggcgatgaacacccgtctcgaaggcggttgtcaggtgccgattggcagctatgccgaactgcgcgatggtgagctgtggctacgagcgctggtgggcgcgccggatggttcgctggtcgtgcgcggtgaacgccgcgggcggcctgaagaggcagaggcgctcggcgtctcgctggcggaagagctactggataacggcgcccgcgacatcctcgcggcggtctatgatggagaagccccacgatgagcatcctggtcacccgtccgctaccgcaaggtgaagagttagtcagccgcctgcgcgcgctgggacgcgtggcctggagctttccgctgattgaattcacgccggggagagagctggcagcgctcccgcgtcaactggcggcattaggcgcggacgatttgttgtttgcgctgtcgcagcatgcggtggaattcgcccatgcccgtctactgcaggagagccaacgctggccctccgacccggcctatttctcgataggccgcaccaccgcgctggctctgcatacggtcagtggtaaaaatatccgttacccgttagatcgggaaatcagcgaagtcttgctacaattacctgaattacaaaacattgcgggcaagaaagccctgattctgcgcggcaacggcggccgggaattactcggcgacacgctgcgagatcgcggcgccgaagtaacattttgtgaatgttatcaacgttgtgcgaagtactatgatggtgcggaagaggctatgcgctggcaatctcgtggagtcacaacgctggtggtcaccagcggcgagatgctgcagcagctgtggtcgttaataccccagtggtatcgcgaacagtggctgctgcactgtagccttatcgttgtcagcgaacgtctggcccttcaggcccgggaattgggctggcaggatattcaggttgccgataacgccgacaacgatgcgctgctacgcgcattacaataactctcaacattggaagccataatgacggaacaacaaaatcaatccgccgtggttgaagagaccagggaggccgtggaaaccacgatatcgaaaccagcgtgacgggtcttgtgatcatcctgatcctcgcaatggtcgtgctgtttgctatcgagtggcttctgcgccgcattttccgtaccggcgcgcacactcgcggctggttcgtagggcgtaagcgccgccgcgcgcgtaagcaaaccgagcaagcgctgctgaaactggcggaaggcgattaccaacaggttgaaaagctgatggcgaaaaatgccgaacacgccgaacaaccggtcgtgaactatctgttagcggcggaagctgcccaacagcgcggcgatgaagctcgcgccaatcagcatcttgagcgtgccgccgaactggctggcgacgatctgatcccggtcgaaatcacccgcgtgcgcctacagttggcgcggaatgaaaaccacgccgcccgtcacggtatcgataagctgctggaagtgaccccgcgtcatccggaggtactgcgtctcgccgagcaggcctatacccgcaccggcgcgtggaattcgctgctggacatcattccgtctatggcgaaagccaacgtgggggatgaagagcaccgcgccgcgctggaacagctggcgtggattggactgatggataaagcgctggccgacggcggtagcgaagggctacgcgaatggtggcgcaatcagagtcgtaaaacgcgtgcgctgataccgctacaggtggcaatggccgaacgcctgatcgaaagcgacgatcacgataccgcacagcagattattatcgatggtctgaagaaacagtatgatgaccgcctggtcatgccgatcccgcggctgaagaccaataatcctgagcaactggaaaaagtgctgcgccagcagatcaaagccgtcggcgaccgtccgctgctgtggagcaccctgggccagtcgctgatgcgtcacggtgaatggcaggaggccagtatcgccttccgcgccgcgcttaagcaacgcccggatgcctttgattacgcgtggcttgccgatgcgctggaccgcttgcaccagccggaagaagcggcgaccatgcgtcgtgacggcctgctgttgacgctacacaataaccctcagcagtaattcacgataacgctatcgcctcgtatggggcgatagctactcttcagaacaggagttctgatgcgcgtaccctctcgttttctctttcctcttgctgccaaaccgcgtttatcgctaccccgattactgctggcgatcatcatcgttggcgcgcttatcggcggggttatcgccgcattgggctctggcgcatggtgggttctgctggtgctgctcattgttacgatcgtcagcaatcgccgctggcgaatgcggcgggcaaaactagccgaacagcgcgccggccagactatttgccaattcgcgcgtgccttcgatatttctcttgtcgatagctgggtgatccgcgccgtgtggttaacgctggataaccagcttaaccagtcaatgccatcagcacctgcgctggcttttgccgccggggatcggctggatgaggatttggagttggttggcgatgatgatgacctgtatgaattattacaagaggccgcccagcgctgcggccgggatctcagcgggctcgaggataatccctggctgccggtgctgacggtgggcgatatggtgcgagccctcaacgcccaaccgatgacgcccgctcgccaacagcggatcgttatccacccctgaaagaaaaaaacgcctgcgctgaaatcagggcaggcgttaaaacaggtctgtttgacaacaaattgggtgcttcactcaacgttatgtccatggtgtttgatgagacataaaatgcgacatctatcagtggacgataagcaccgtaagtacggctctgcatcattcccgagtttatgaggcacgaaggcgaacataagagatggaatgagcatctacccggttattatcgcacaggatcctgggagattgcatctatcgcagcaatcatttgggacaattccgggcaataattcgcagagctagaaacgattttttacgaggaagatcagcgggataaaaggcgcctgaagaaaatcggaaaacaaaaaaccccgccgaagcggggttcaaaattggtcggcgagagaggattcgaacctccgacccactggtcccaaaccagttgcgctaccaagctgcgctactcgccgaaatactgctttttgaatttttagttcaattctttaaagtcgtggtgcgaggggggggacttgaacccccacgtccgtaagaacactaacacctgaagctagcgcgtctaccaattccgccaccttcgcaattcacaactctatcaaataatggggtggctaatgggattcgaacccacgacaactggaatcacaatccagggctctaccaactgagctatagccaccacaacaattcttttacgcggtattaaaaccaccgcagctccagcaccgggtaaatggtgcgcccgacaggattcgaacctgagacctctgcctccggagggcagcgctctatccagctgagctacgggcgcttagcgccgttgcgggggtggataatacggacttcccccacccctgtctagtgcctttttaaataaaatttctatttgctcacagtttgtgcgctttggcgcttattccgccgttttatcgagatttccccgcttgccgaggccgaaaaccttataaataagggtcaccgcggcgaggaatatcattccgacaaagagcgacatccgggtttcatcgttaattcccatgccgatcagcacacaaacgaggaaagccatcgtcaaatagtttgcccacgggaacaacaatgaacggaacggatggctggccatcgcctgctgatgctcgcggcgaaaacgcagctggctaatcaggatcacaaaccacggcaccatccccggcaacacgctggcgctatagacatagacaaacacgcgctgcgggttaggaataatgtagttcaggcacgaaccgattagcagaatcacgatcgacagcgcgacgcccgccaccggcacgccctgacgcgacactttggccattgctgccggtagctgacggttgcgcgccagcgcgtacagcatacgcccacagctatacatcccgctgttacagcccgacagcgctgcggtcagcaccacgaagttgataatccccgccgccgcggtaatgccgattttggcgaaggtcaggacgaacgggctaccggtcgatccaatctggttccacgggaagatagtcacgataacgaaaatcgcgcccacgtaaaaaatcaggatacgccacagcaccttacccaccgcgctacgcaacgtgacctgcgggtttttcgcttccccggcggtgataccgataagttcaacgccctgataagaggcgacgacaatacacagcgccgtcaggaagcctttccagccgccggcgaagaagccgccgtgctcggtcaggttgccaaaaccgatcgactgcccgccgttaccgaagccaaagaagatgacgcccaggccaatgacaatcatcacgataatggtggtgactttaatcatcgcaaaccagaactcgatctcgccgtacagacgcactgccgccagattcgctagtgctaccaacccaacggcaattagcgccgggatccactgcgccatctccgggaaccagaactgcacgtataccccgatggcggtgatctctgatattcccaccgccatccacataaaccagtatgaccaggccgtgagatagccgaagaacgggctcatataacggtgcgcgtaaacggcgaatgagccggttaccggttcgaggaacaacatttcgcccatcgaacgcatgataaagaagacaaataaaccggcgataatatacgccagcaggacggatggaccggcccacttcagcgtacttgccgcgcccatgaataaccctacgccaatcgtcccgcctagcgcgattagctcaatatgccgggcctccagtccacgctggagttccgcttttttctcagtcataaagcctcttgtgtttgctgtactccgggtactcccggttattgttattaattgaaaccatagccttgccgacgcgcaggtctcccccacgcgtttgaagcatgcgaatggttaattaattttacggaaatggcaaataaagtatcaggcgagtgaagagattacacagaatatgtatgcaatctcgcctggttgcagtggaatatcagagcttgccggaataatgccaacgtaaatagcgcagtaaacggaactgtcttttgatacggctcggttgcaggagcaggcgatagaaccactccagccccaggttctgccagaattttggcgcccggtgaacgtggccggtaaagacgtcataagtgccgccaacgcccatatacagcgcggcgggatacaccagccggcagtcgcgcattagaatttcctggcgcggcgatcccatcgcgacggtgacaattttcgccccgctgtcgcgcacccgctcaaacagctgctgacgctgatcggcggaaaaatagccgtcctgactgccgacgatattgaccttccagcgctcacgcagcttcgcttgcgtctccgccagcacctcgggcttgccaccgatcaggaacaccggcgttccctgagcgccagcccgctccatcagcgcttcccacagatcggcgccggcaacgcgcgacacctcagcctgcggatattttttacgtaatgagcgcacgacgctaataccgtcggcatatttaaactcggcggcctcaatcagcgcacgcacttccgggttatcttctaccgccagcatcttttcggcgttgatcgcgaccagcgttccctgacgcagttcgccgtcggcgaagagatagttgagcgcatgctgcatgtcgcgccagccaatcagctgcagccctcgcagcgcatactgcggcgccgaagtgttatcagtcatgttcatccttatcagacctgcggttgcgaaagcggcttcacccgcttatgaatcaatcctgcgctgtccaggagccagtacagcagtttcgccgctaacaagcagataccaaagatcacgaggaaaaacaccacgcgggagccgaacgaatccaacccttcgcgtgccagcactatcatgttgaagatagcgccgaaacagaaactgtgcaggatagccgctttgtagcgattgctctcccggttgcccagttcgtacagccagtcgaaccatttaatgatgagccctaccgcgacggcgcccagcggtacgaaccatacgccgcccatcaccaccagcgaaccaatcagcgtcggcgatatcgccagccccgaatggttatttaacacttcccaggtgaagtaattggcggtattcagcaccattgtcgggcgaccgtgccacatccaactggggataaagacgtagaagtcgcggatcatcggcgccaacccctggaactcaatcttgtcgtagttctgcagcaacagcgccaggttctcccacggcgagaaggtatcgcgcgtgagatagaggaaagtataaaacgcttcatcgccgctaacgttcatcccatagcgcttcaacgccagccagaacatgccgacaatacccagcacgcccgctgccgccagcatccacaggctgatccagccgcgaataatgccgataaacaggaagatagcgaaagcgataatgatgttggcgcgggtaccgccgacgatcgcgtaggtcagcagaccaaaggcgacggtgctcaccaggaagaaaatccacgccttgtaatcctgacgcaggaaatagatcaccagcatcgccggaataaagaagtagaagaagcgcttcaacgccacgccggacacttccgcggagaatatctggctgtatgaattgagcttaaatagcaggaaaccgttgtgggcgaagaagataccgacgcacagcagcgccagccccatcaaaatcccccaggccagatgggtttcaacccggttcatggtaaacagcggacgacgtggaacatcgcgcgatgccggacgcaatcgcgttttgtaggtcacgtagtagatggcatagaagcacaccgcaaccagcagcgtctgcagcaaaatctccggcggcgccacgctgacgtcaaagcggaataccaggatactggttaacgggaagccgaagaaaaaggtgagcaggaacaacaacgagaaaaagacgttgaagttaaagcgcacgcggcggaactcaaaccaggtggcggtggcgataaacagcgtcgacagcagccagaccaccaacagcccgctaaattgcattaacgtcatacccgcgcctccgctgccagctgtagcgcccgctgccagcccgccagatagttcgggcggaagaaggcgatttgcgttttatcaacgctcgctaactgacgctgtgcttcgcgcaccacgttggcgtccagggtatcggtggtaaacagcaccgggatctgttgttcggtcatatcctgccagaacggattttcgcgattgagcacgcagggaatacccgcctgaatcagcaggcacagcgtgccgataccctgctggcgcgcaaacaggaaataacccagatcgcagcggcgcagcagcgccagataatcatcaaactcaagcttctcgctaaggatctgcagatgctcgcgactaaacagtgccgctcccgtctgacgcacttcatcaatgtaggcttcattgttggccggataacccatcggcacgatgacattcaccgtatcgccaaattgctgatgaatcgcccttagcgccgcaatatgctcattactacgatcgccggagttccccaccagaatggtcagcgtgtcaccgcgcggggcggtatcggcaagggaatttagcgacggatccatacgcgtcgggaagtacagcagttcgcccggcactcgcggatggcggttagcaaaccagctgagatcgccgcgggtggcgaaaacgcgtcctacccgcccttgcgccatgcggcgcagaggataaaacagacggaatttcaggctggctgagttttcatacagatccgcgccccagatatgccagttaaattgcgacgggcggatcccgccgctcaacaacgccagccacagaccggtattaaactggccgtggaaaaaaaagcgctgctggcgatcggctttcgctttggcaatcaccgcctgcgccagcgatttcttacccggatagcaggtaatttccagcgccggatacgcctcgcgcatacctgtcgcatcacccacgaccataaacgtcctggcccgcgcgtcggcggccagttcgtcgttaaagaaccgcaatacggtctggttgtggtgcgggatatccgatcccagtacgtgtatcagtgctgtcatgcccgtttacgccagagtaaaaacacgccactacaaagggcgaaataaacaatataagtggccatatacgcctgcgccgcgccaagtgcgccgtgcgccggaataagccagtgtgaaaatgcggtcagcagcgtgaactggctgatttccgtcagaatataaaaacgcaatgacgctttggcgatcaccagatagccgtagacgtaagcgccaacttttaaaacatcgcccaccaactgccaggcaaacaggtcgcgcatcgcggtgaagcgcgcggaaaacagtaaccagatggcaaaatcgcgcagcagccagaccatcaggcttgccgccgccaccgccggcaggacgaatttcaacgacttcactatctcacgcgtgatgtccgtcttggcgctcagtcgcgacaacgtcggcagcagatatacgctaaaggaagcggtaataaactgcaggtaggcatccgagatactgctcaccccctgccagataccgaccgcctcccagccgtaatgcgccgccagcagattacgcatcatcacataggccaccggcagcgtcaccgaggtaatcaacgccatcagggtaaatttcgataactgccccgcaagcccgttatcccaacgcggacgtagcgcgtttagcgggatcgcgccgcgccgccatagcataatggcggccggaaccaccaccagcgcgggaactaaggccagccctaacagcgccccctgataaccaccaaagtagtaacaggcgtagtaggccgccacgccaatcaggctaccggcaatcagcgaaaaagcgttacccgccgcatcgcgaaaacctttcatcagcgccagcagatagttggcccacgcaattcccatctgcaccagcgccaccaaacgtaccagattctgatagtgcgaatggccgaacagcgcctggcttatgggcgccgccgccagcaaaaagaccagcgccagcagggtggaaaaaccgagcaccattgaagacgaggttccaaccaccagcttcaggcgtagcggatcgtcgtgatgttgggcaactagcttagtgacgccattaaaaatcccggcgcccgccaggacgcccagaacggtgaccagttgccggaagttaccggcctggcctacgcccgccggaccaaatgagaccgccagcagctttaccaccagcagaccggcgcctattttgactaaggtggacgccgcggtccacagtgatgcttttgccaacgacatatcaggagaagtagctcagcagtgaattaatcaccgtccgttggtttaccgcagacaggttgtagaacagcggcaaacgcagcaggcgttcgctctcctgggtggtataacgatcttcgccgcagaactcgccgaactgttcgccagccgggcagctatggagcggaatataatggaacaccgccagaatttctgcctctttcagccagttaatcagcgccgcgcggtcatcgttatcccgcagcttaatgtaaaacatatgcgcgttttgcccgcaatccgccggcaccgccggcagatcgatccggcccgcgcgcgccagcggcagcagcgcgtcataataagtttgccacagcgtcaggcgctgttggttaatccgctcagcggcttccagctgcgcccagagataggcggcctgtagatcggacatcaaatagctggaaccgatatcgcgccaggtgtacttatccaccagaccgcggaagaactggctacggttagtgcccttttcgcgaatgatttccgcgcgttccaccagtttacgatcgttgataagcgttgcaccgccttcaccaccggcggtgtagtttttcgtctcatggaagctaaagcagccaatatggccgatggtacccagcgcgcggcccttataggtggacatcacgccctgcgcggcgtcttccaccacgtacagattatatttggcggcgagcgccatgatggtgtccatttcacaggccacgcccgcataatgcaccggcacgatcgcccgggttttatcagtgattgcggcttctatcagcgattcatcaatattcatcgtatcgcgacggatatcgacgaagacgattttcgccccgcgcagcacaaaggcattggcggtggaaacaaaggtatagctgggcatgatgacttcatcgccaggctgaatatccagcagcagcgccgccatctccagcgacgcggtgcaggatggcgtcagcagcgctttggcggtgccgaagcgctgttcaaaccactgctggcagcgacgggtaaaaccgccgtcaccgcaaagcttgccgctgttcatcgccgattgcatgtaatcgagctcagtccccaccaccggcggtgcgttaaatggaatcatcgtgtcacctgtataaccagtacgcggtgctttccacattcgcaccgctgagaatataacgtttaagcgcggcggtgttgcccatctgggtcgccacccgcagtgtagaaagcccgcgttgcgccgcccagtggcgcgccgcctgcataagctcggcgccagcgccgcgcccggccagcaggccgatacgcgcgtcgctgtcgttgagctgacgcaaagaaacaaatgcgcggatgtcgccatcggacgcgcgaaatagcagacactggtggtcaaaggtccccagcaccgcgttttcaatccattgcgcgtagaatcggccgctggcatcagcggcgtaccagggagcgcgaaaacggctcatagcaaaggcctgcgccgccagttcgcgcagtcgcgcaatatcgccttcaacggcccattcggcgccggcatcagccggctcgcctaccggcaacgccagatcgacctcgccttccaccagttgaaaaccgatctcctgtagcgcatccagccgggcggtgtcgctggcagcgactttcgcctgcactcgcgaccatcccgccagggtttcagcggtgagctgcggcgcgcgttcgtcaaagcgaacgatgccgctattaacggcgaagaagcggttttcccactccaacgcttcaatactggcgcgggcgggcacggaggagatccagcaagtattggccatagccggttttttccagccgcttcgcggcgcgtttgacgccgtcatcgtcaagccagccgttacgccaggcaatttcttccagacaggcgattttaaagccctgccgcttttctaccgtctgcacaaacatgctggcttcaatcagactatcgtgcgtgccggtatccagccacgcaaagccgcgcccaagcagctcgacggttaacgcgccatcctcaagatacatctggttgatggaggtaatttccagctcgccgcgctcggacggtttgacccgtttagcatactcggccacttttccatcgtagaaataaagcccggtgaccgcccagttcgacttcggttgtttcggcttttcctccagcgacaaggcgcggaagttgtcatcaaactccaccacgccgaagcgctcaggatccatcacctgatagccaaataccgtcgccccttcggtgcgggttgcgacgctacgcagcttagggctaaagctctggccaaagaagatattatcgcccaacaccaggcacgccggttcgccgttgagaaacgcttccccgatgataaacgcctgggctaaaccatccggcgtcggctgaacggcatagtgcaattggataccaaactcggaaccatcgccgagcaggcgttggaaatcgcgctgatcttccggcgtggtgatgataaggatttcacggatcccagccagcattaacaccgacagcgggtagtaaatcatcggcttgtcgtaaattggcagcagctgtttcgacacgccgcgcgtgatgggatgcaggcgcgtaccggaaccgcctgccagaataatacctttcatcatgcccccctgggccagttagccgtgcagcccaagacgctcgccctgatagctaccgtcctgaacctgtcgccaccatgcctcatttgccagataccactggacagttttgcgcataccggaagtaaaggtctcatccggcgtccagcccagctcgcgtgcaatcttcgccgcgtcaatcgcataacgcagatcgtggcctggccggtcagcgacgaaggtaatcagatcgcggtaacgcgccacgccctgcggcttatgcggcgccagctcttcgagcagttcgcaaatggtttccaccacctcgatgtttttacgctcgttatgaccgccgatattgtaagtttcgcccggctcgccgcgggtcgccaccagatacagcgctctggcgtgatcctcgacgtacagccaatcgcgaatttgttggccgttaccgtaaaccggtagcggttttcccgccagcgcgttgagaataatcaacgggatcagcttctccgggaagtgatacgggccgtagttattcgagcaattagtgataagcgtcggcaggccgtaggtacgctgccaggcgcgcaccagatggtcgctgctggctttcgaggccgaataagggctgcttggcgcataaggcgtggtctcggtaaagaaatcatcgctgccatgcagatcgccatacacttcgtccgtcgagatatgatgaaagcgaaacgccgatttttgctccgccgccagcgtattccaccagctgcgcgcggcttccagcagcgtataggtaccgacgatattagtctcaatgaacgccgccgggccatcaatagaacgatcgacatggctttccgccgccagatgcatcaccgtatcgggttgatgctgttggaagatgcgatccagctcggctcggttacagatatccacctgttcaaaggcaaaacgcgcatcctgcgccaccggcgccagcgacatcaaattgccggcataggtcagcttatccacgaccacgacgcgatcggcggtgtgctggatgatttcacgcactaccgcggagccaataaagcccgcaccgccggtgaccagaatcgttctcaccgccacactcctttggtgtcgatgatataggcctgagtaacgctatcgccgctaacggctttaaactcgttgtgatcgaccagcatcaccagcacatcggcgctcgccagcgcattatcaagggtcgccagcgtacacaggccatcaagcttcttcggcagcgtgtgaatgttgggctcaaccacctgcgtcacgccgctgtgccagcgggcgatctgcgcggcaatttccatcgccgggctttcacgtagatcatcaatgttaggcttaaaggccaggccgaagcaggcaatagtcagttcactggcgcgtttattgctggcattcaggcactcggcaacctgtgctttcacccgttcgataacccattccggcttgtggtcgttaacctcgcgcgcggtgcgaatcagacgcgcctgttgcgggttttgcgccacgataaaccacgggtcgacggcgatacagtggccaccgacgcccggacccggctgcagaatattgacgcgcggatggcggttcgccaggcggatcagttcccagacgttgatcccctggtcggcgcaaatcagcgatagttcgttagcaaaggcgatgttgacgtcgcggaagctgttttccgtcagcttgcacatttccgcagtgcgcgagttagtcactacgcattcgccttcaaggaaaattttatacagctcactggcacgcgccgagcagaccggcgacataccaccaataacgcggtcatttttgatgagctcgaccatcacctgccccggcagtacgcgctccggacagtaggcgacattaacgtcagccgcctcgcccacctgctgtgggaagctgagatcggggcgcatcgccgccagccactcggccatctgttcagtcgaaccgaccggcgaggtggattccaggatcactaacgcccctttcttcagggtcggggcaatagatttagcggcggattcaacaaaggccatatctggctcatgcccgcctttaaacggcgtcgggacggcaatcaggtaggcgtcagactccaccggcacggtggtggcgcttaaatatccctgttcaaccgccgtttttacgacgctcgctaaatccggctcgacgatatgaatctcaccacggttaatggtctcaacggcgtgttgattgatgtccacgccaaccacccgccgttgccgggaagcaaatgcggcagcggttggcagaccaatgtacccaaggccaatcactgaaatggtagaaaaactcatagcgttacctgattatttttaagagcggataaaatacgatcgcatgcctgaccatcgccgtaagggttatgggcccgactcattgcctgccaggcggcatcatcctgcagcagacgggtgacttcatcgacgatacgctgcctgtcggtgccgaccagacgtacggtgcctgcggcgaccgcctccgggcgctccgtcatttcgcgcatcaccagtaccggtttcccaagcgacggcgcttcttcctgaatcccgccggaatcggtcagaatcagccatgcgcgattcatcagccagacgaacggcaggtaatcctgcggatcaattaatttcacgttagcgacatgcccgagaatacggttaaccggctcgctgacgttcgggttcaggtgaaccggataaacaatctgtacatcagggtgatggctggcgatatccgccagcgcatggcaaatgtgctcgaagccgagaccaaagctctcgcggcggtggccggtcaccagaattaatttcttatcctcttcgaggaacggatagcgctgcatcagttcattgcgcagcgcctcgtcgccaaggacacgatcgcgaacccagaacaacgcatcgatcaccgtattgccggtgacggtaatgcgctcttcgttaatattttcccgcagcaggttatcgcgcgaggtggcggtcggggcgaaatggtacatcgccagacgcccggtcagcgtgcggttaccctcttccggccacggcgagttcaggtcgccggtacgcaggcccgcttccacgtggcccaccgggatgcgctgataaaacgccgccaggctagccgccatcgtcgtcgtggtatcgccatgtaccagcaccacgtccggcttaaacgactccagtaccggctttaaaccttgcagaatgcggcaggtgatctcggttaatccctgacccggctgcataatgttcagatcgtagtccggcgtaatcgaaaacagtttcaacacctgatcgagcatctcccgatgctgcgcggttacgcaaacctttgcctcaaaatgaggatcctttgccagcgcatggaccagcggcgccatcttgatggcttctggtctcgtgccaaatacagttagtactttcacatcgattctcttcgattaggtgatgatggcgcggagccttcatcacaggccccattcactggacacgacgacgtgctaacgccacgcctgcgccgatgagcgcgcccacaatcccccacatgatcatcagaaatacacgccgcgggctatcgcgttttacaggttcttccggcgtacgcaaatatctgtaagtctgaaaacgtggatccagcgtcgggccaacgtttagcgtgttcagcatggcgcggttctggtcatagtcgagatcgtattccggccctacggcctgcagattttcgaggcgcgcctgcagcatcggccggccaagtaagaagagttcggaggccggcagctgttccgccggaacatcggtctcgctgcgggaaatgttatgttgctgggcgattttcaacgcctgctcgacgctctgcacgcggcggttgaagatctcgcttgccacctcttcctgacgcttcacctgcgctttcatctgtaccgtacgcgccgcccaggcgcccttcagctcatcattaagatgaccagcggcacgttggctggcaaaagcgacatactgacgcagcagattattggcatctggcgcggtctccgccgtcagcttgatgctgtcattgacgcttttcagcgggtcgccggggataaactgaatatcgttaatcagatcgtcaagcatcgcggcatccgcgcgtgagttgcctgactggcgctgcttgtagtaatcggtctgcagccagaagtcacggcgggtatcccatgacgcctgttgcataataaactctttgtatgcctcatccatggcggaaggttggtctaccgaagccagatcggctttgatatccaggttacgtaagaactgctgttgcgaatagtatccgcccagcatattgacggtcggccggtcggtaattgccgtcgcgctccactcctggcgagcaaaaaaggaataaataagaacgatcagcgcgaacagcacggcgatgccgactatccagccttttcctgcccataaggcgcgaaacagcccgcgaatatccagttcgttctcaacgttcactgcttgtgctcccggtaatggttgagtcatcacttccccagttttactttgttaaatttggattattgccgctgtgtcgccgaattctgcgtctaatgcgcttaaccagacgcgccactttccatgcgcgcttaatgcagtagccataaagtaaaaaagcaaacaaaaagagtattaacatcacccattcaggaacaatacgggtgtattccgccactacgccgaccagcgccagtaaagcggcagccagcgtaatcaggacaaaggcctgccgggaagtaaacccggcacgcatgatcaaatgatgaatatgctgacgatctggcgagaacgggctcatcccctttcgcaggcggcgatacataatcgccaccatatccatcagtggaatcgcaataatccacagcgccgtcaccgggctgatgggatgcgttttgccctgcgtcgtctccagcaggatccagataatggtgaagccaatcatggtactgccggcatcacccataaacactttatagcgacgtccaagcgcgccaagattaagtaaaatatagggcagaatggcggcgatcatcgcaaaacaccacatcgccaggctgtactggccatcaaaccataagatgatgccggttgccgcgaaggagacggacgaaagcccgccgagcaacccgtcaatgccatccaccatattgaaggcgttgattgccgcccaaacggcgaaaagcgtgaggaaaaaaccaaaggggccgaggactaactcccacgaaccgaaaatatagccgaggctgctgagatgcagattacccgccgtcatcatgataacggctatcgcggcctgaataaccgcacgaatttttacgctgatgtcaaatcggtcatccaacgcgccgaccaacaccagcacccccgcgcaggccagatacagcgtggcatgagggatataataatcggcaatcgcaaaggtaaaacaaataccggcataaactgagataccaccaactaacggaatcaaaccttgatgccgtttccgatagtttggcttatccactaacccaatttttttcgctgctttacgggcaacaaatataaacagggtcgtgaataagaaaacactgattaattcagtaatagcagtgagtaaattcacaacacatgtgctctcagcatagttaatccggggagtataacgatgatgtctccactcctgaaggggaaaagcagaacattacaaatttattgtatatattttagactgttaaagtcctttctgcttaacccgccgcgcatatcatacgtcaacgctggcggtgcttttcccgcctggatcatacaaagctacaaaacaaaacgccacgcaatcgcgtggcgttttttcggcgtattccgtcctacgaacgcttcatcatatcgaagaagtcgtcgttagttttggtcatcgccagcttgttaatgaggaactccattgcgtcgatttcacccattggatggatgattttgcgcaggatccacattttctgcagctcttcttgggtggtcagcagctcttctttacgggtaccggaacggttgtagtcgatagccgggaagacgcgtttttccgcaatcttacgggagaggtgcagttccatgttaccggtacctttaaactcttcgtagataacttcatccattttagagccggtatcgataagcgcggtagcgatgatggtcaggctgccgccctcttccacattacgcgccgcaccgaagaaacgcttcggacgatgcagggcgttggcgtccacaccaccggtcagcactttaccggaagccggaaccacggtgttgtaggcacgagccagacgggtgatggagtcgagcaggataataacgtcttttttgtgctcaaccagacgtttcgctttctcgataaccatttcggcaacctgcacgtgacgagatgccggttcgtcgaaggtagaagcgacaacttcacctttaaccagacgctgcatctcggtcacttcttccggacgttcgtcgataagcaacaccatcagcacgcagtcaggatggttgtacgcgatgctctgcgcgatgttctgcagcagcatggttttaccggctttcggcggcgcgacgatcagaccacgctggccgcggccaatcggcgatgccagatccagtacgcgagcggttaagtcttcggtagaaccattaccacgctccatacgcaggcgtgaattcgcgtgcagcggcgttaagttctcgaacagaatcttgttacgcgcgttttccggcttgtcgtagttaacttcgttaactttcagcagcgcgaagtaacgttcaccctctttaggaggacgaatcttaccggaaatggtgtcaccagtgcggaggttgaagcggcggatttggctgggggatacgtagatgtcgtctggaccggcgaggtaggagctgtctgctgagcggaggaatccaaatccatcctgcagtatctccagtacgccatcgccaaagatatcttcgccactctttgaatgctgcttgaggatggcaaaaataatatcctgcttacgcatacgagccaggttttccagccccatattttcgccgagagtaatcagctcagaaaccggcgtattctttaattcggtaagattcatagtggtgtgggttcttaaactcggggtaaatctcgaacttaatgttgtgaatggtatggcaggaacatccatgcctgttagcggcttcatctcgtgtctgtacgttgcctggtcacaggaaagaacgcagaactgaaacgacaagacggaatgagtgataagcccggaattattagcctcacgcgcatagtctgcgggacgctttgggtaaaacaagattcaaacaataggtatgtttaaaacgaagtctggaattaacttagcacgactcaagccgggcgtccagagttccacaaaaaataggaatccggacgccggaatggcaaaccgattacgccaggttggcgtcgaggaactctttcagttggcctttggacagcgcgccgactttagtcgccgcgacttcgccgtttttgaacagcagcagcgtcgggatgccgcggatgccgtacttcggcgccgtgcccgggttctgatcgatgttcagtttagccacggtcagtttgccttgatactcttcagcgatctcatccagaatcggggcgatcattttgcacggaccacaccactctgcccagaaatcgacgagggtcagcccgtcagccttgagtacgtccgtgtcaaaactgtcgtcagtcaggtgaataattttatcgctcatatataactccacaggaataagcctggtgtgttggtgtcgcagtcatcaacgacgtgttgatgctacgttatgcacgctattcttcaggatgcctcttttataagctacctgcgggaatggatccaccatggaccaccaccgccgatgcttaagcgcactgtctgcaaatctacctgcggcagattaaccgcccccgttgcgcttagtagtctaagctttccgggatccattcagtagccggagacgcaccttgaataatttcgtatatcgccaacgaaaggttgacgttatttcaccggatacgctttcttaatgcaatagttagctgatattctaccacactatgagcaaaacacatttgacagaacagaagttttccgacttcgccctgcacccggcagttgtcgaagcccttgaaaaaaaagggtttcataattgcacacccattcaggctctcgcccttccgctcacgctggaaggccgcgatgtcgccgggcaggcgcaaaccggtaccggtaaaacgatggcgtttctgacgtcaacgtttcattatcttctctctcacccggccatcgcagaccgccaggttaaccaaccgcgcgcgctgatcatggcgccaacgcgcgagctggcggtacagattcacgctgacgccgaaccgctggcgcaggccaccggtctgaagctcggtctggcttacggcggcgacggctacgataagcagctgaaagtactggaaagcggcgttgatattctgatcggcaccaccggtcgtctgatcgattacgccaaacaaaaccacattaatctcggcgccattcaggttgtcgtgctcgacgaagccgatcgcatgtacgatctcggctttattaaagatatccgctggctattccgccgcatgccgccggccactcagcgcctgaacatgctgttctccgccacgctgtcttatcgcgtacgcgaactggcattcgaacagatgaacaacgccgagtacgttgaagtcgaaccggaacagaaaaccggccaccgcattaaagaagagttgttctatccttccaacgacgaaaaaatgcgcctgctgcagacgctgctggaagaagagtggcccgaccgcgctattgttttcgccaacaccaagcatcgttgtgaagatatctggggccatctggcggcagatggacatcgcgtcggcctgctgaccggcgacgtggcgcagaaaaaacgcctgcgtattctcgaagagttcacccgcggcgatctcgatattctggttgcgaccgacgtagccgctcgcggcctgcatatcccagccgtcacccatgtctttaactatgacctgccggatgactgcgaagactatgtccaccgtatcggccgtaccggccgcgcgggcgccagcgggcactccatcagcctggcctgtgaagaatacgcgctgaacctgccggcaatcgaaacctatatcggccattcgatcccggtcagcaagtacaatccggacgcgctgatgaccgatttaccgaagccgctgcgtttaacgcgcacccgccccggtaatggcccgcgccgtaatggcccgcctcgtaatcgtcgtcgctcaggttaatatctatgccatacacgaaatttttcaggatgcgccacggagattatcccgggcaacgaagcccagtcgacacaggagctgcctgaaagatgaagagtatgagttccacctcgctgtatgccgccatcgaccttggctccaatagttttcatatgttggtggtgcgcgaggtggcgggcagtattcagaccctgagccgcattaagcgcaaggtgcgtctggctgccggcctgaatagcgacaatgcgctctccgcagaagcgatggagcgcggctggcagtgcttacgcctgtttgccgaacgtttgcaggatattccttcggcgcaaattcgcgtcgtcgccaccgccaccctgcggctggcggtcaacgccggcgagtttctggcgaaagcgcaggaaatcctcggttgccccgtccaggtgattagcggtgaggaagaagcccgcctgatctaccagggcgtagcccataccaccggcggcgccgatcagcgtctggtggtggatatcggcggcgccagcactgaactggtgaccggcaccggcgcgcaaacgacctcgctgttcagcctgtcgatgggctgcgtcacctggcttgaacgctactttgccgaccgtagcctgacgaaagaaaacttcgatctcgcggaagcggcggcgcgcgatgtgctgcttccaatcgctgatgtcctgcgttaccacggctggaaagtgtgcgtcggcgcttcaggcaccgtgcaggcgctgcaggaaattatgatggcgcagggaatggatgagcgcatcaccctcagcaagctacagcagcttaagcagcgcgccatccagtgcggccgactcgaagagctggaaatcgaagggctgacgctcgaacgcgcactggtttttccgagcggccttgccattctgattgctatctttagcgaactgaatattcagtgcatgacgctggctggcggcgcattacgcgaaggcctggtctacggcatgttgcacctttctgtcgatcaggatattcgtagccgcacgctgcgtaatattcagcggcgctttatgatcgatactgaacaggcgcaacgggtggctaatctggccacccatctggttgatcaactggacagcggctgggaactggatccgctaagccgtgatttgctcgtcagcgcctgcgcgcttcatgaaattggcctgagcgtcgatttcaaacgcgcgccgcagcacgccgcctatctggtcaataacctcgacctgcccggttttaccccggcgcagaagaagctcatcgccacgctgctgctcaaccagactaacgccatcgatctttcttcgctccatcagcaaaacgcggtaccgccgcgcgttgccgaacatttgtgtcgcctgctacggctggcgattctgtttgccagccgccggcgcgacgatctcctgccagccattcaacttgccgccgacgacgaaaaactgacgctgacgctgccggatgactggctgaaggaacatccgctgggccgggaaatggtcgagcaagagtgtcagtggcaaagctatgtccactgggcgctgttgatcaacgacgacacggcgaggtaatttccagccaggagggcgcatgcaggaagaactggatttcaaatcactacgctttttctccgcgctctaccgtttggggaatgtttctccggcggcggaagcactcgatatcagtcagccaaccggtagcctgctgctaaaaaagctacgcgagcactttgacgacccgctgtttgtgcgcgttggacaacgcatggcgccaacgccgcgcgcggacgctatcgcccccaccatttttactcttttgcaactggccgataccgatctggcggctaagccgaaatttatcccgcaggagagcaaccgtaacttcaccatcggcatgaccgatatcagccagatgacgcttcttcctttgctgcaaagccagctccagcggctggacgccagcggcatcacctttacggtgctgaatattgacgatcagacgcttagcgcgctggaatcagggaaatgtgatttggcgatcggctatcttacccaactgccggagagcgtctatcagcagcatctgttcgatcagtcgtatgtttgtctggcagcggacaatcacccgcgcattcgtcatcggttcagcgtcgaagactggcgtcaggaaaagcaccttgcggttcgcgtcaacggcaccgcccacggcgacattgataaactgctggcggaacacagtatgccgcggcgtatcgcattgacgctgcccagctttttaggcgcgggcgagctggttgccggcagcgagatgatcgcggtggtgccggagcagctggcgcgccacatcaccaggcgttacccctgccgcagctggccgctacctttctcactggctaacatcgcgattcgccaggtctggcaccagcgtctgcaccgcgatcctgggcatatctggctgcgcaagcagattgtagatcttgccgcctcaggcggttctattagcatttaaatcataaaataagcggcagtattaggatttctgatacgctatattctatttggtttattgctgtcaatacgtcaaacattttaatctccccgcatcagttcatatcgaccgaataaataaaggaacctatcatgcgcggaaaaatcgctttagaagaacatgtatctactcctgaaaataaccgtttatgggattcgaccggcgaagctaaccgtaacggtagcgaatatatgcaagacgtagagcgccgcctgcttgaccgcagcattcaactcgaagaaatggcgcaacgtaatattgaccacgttattctttctctgacttcacccggcgcgcaatctattttagataaagccaaagcggtctctttcgctcgcgacactaacgactttatcgttgataattatgtaaaaccgaatccggataaatttagcgcgttcgccacgctggcgttacaaaacccggaagctgcggcggaagagctggagcgcgcggtgaaaaaactgggcatgaaaggcgcgctgattaacggctacaccaacgtcaaagacagcgaacatggcctgtatcttgatgatgaatccatgctggtattctgggataaagtcaacgagctaaacgtgccggtgtacctgcatccgcgtgaaccgctggaaggcccggcgcgcgggatttataccggttacgaaagcctaatcggttccgcctggggctttgcgcaggaaaccgccgttcacgctattcgcctgatgatgagcggcctgttcgaccgttatccgaatcttaacctggtgctgggacacctcggtgaagggctggtacacatgctgccgcgcactcaacatcgcctctatcgtcagcgtttcggctgcggtttgggcaaggcggaaaaaccgttaatgcactatctgcaaaataactttattgtcaccaccagcggtcattttaatactcactcgctaaataatgcgattgaagtaatgggtgccgatcgcgtgatgttctccgttgattacccttatgaagatattcatcaggcctgcgactggtttgatccgttagaaatggatgaagggctgaaagaaaaaatagcctggggcaatgccagccgcgtatttaatatcaaataataaaaaataaatcgacagggcctgttctcaggccctggttttattacagggagaatatactatgccggtaggtatttttgtttgcagcggttcattactcgtcggcgcgattgcaggcgcctcactcaaccgatttatcccggatcactttaagaaaacgctaccgcttatttccgggttaatctctatcagtatgggcgtgttcttccttaacaaactcatcaatctgccacccattgcgctggccgttatcatcggcacgattattggcggcctgttgaatattgagaagtggattgagcgggcgggaacacagctgcgaacgcccatcgagcgcatttttccaggccaaaacaacgcaggcgtagaagcggaggattttatgaaccagtttatcgcggtgctgatcctgttctgcgccagcggtaccggtatttttggcgccctaaccgaagggatgaccggcgacccgaccattctgctgaccaagtcgatactcgactttttcaccgccgccattttcgcttcgacgctgggctacattatcaccgcgatttttattccccagctgatcatcttcgtgattctgttcttcgccgccacgtttattatgacgttgataagcccatcgatgatcgctgattttactgcctgcggcggtattattatgctggcgaccggttttcggctttgcggtattcgccatttccccaccgccaacatgctgccgtcactgctgctggtgatgccattttccaccgcctggcagcagtttgtcgcctgaaacgttagccctttttcgccttcgccagcatcgccttgatattcgcaacgttggcctggcctttatgcatacgttcttccgcagagatgactttccgctcctgctcccaaatcagatcgtcttgcgggagctcaagcagaaaacggctcggctccgggcgcaccagctcgccatactgacgacgctctttgcacagcgtgaaagtcagctctttctgcgcgcgcgtgatacctacataggccagtcgccgttcttcatcaacattatcttcatcgatactgctctgatgcggcagcaatccctcttccattcccaccagataaacatacgggaactccagcccttttgaggcatgcagagtcatcaactgcacctgatccagctcttcatccgattcgccgcgttccatcatatcgcgcagggtaaagcgggtaaccacctgcgtcagcgtcatcggctcatctatctcgctgccttccagcatttcggtcatccaggtgaacagctggttgacgtttttcatccgcatttccgcggctttcgggctcggcgaggtttcatatagccaggactcataatcaatcccgcgaattaaatcccgcacggcattgactggttcacgctcggccagttgctgaatttcccgcagccagtgggtgaaacgagtgagggattcatacccgcgcccggtcagcgtctggcttaaccccatatcaaagctggcggtgaataagcctttattgcggctcatcgcccattcgcccagtttttgcaaggtcgccggaccaatctctcgcttcggcgtattgacgatacgcaggaaggcgctgtcgtcatccgggttggtgagtacgcgcagataggccagcagatctttaatttccggacgcgagaagaacgaggtgccgcccgagattttgtacgggatgcggttctgcatcagcatcttttcaaagacccgcgactggtgattgccgcgataaaggatggcgtaatctttgtagtttgttttattaataaagtggtgggcaatcagttcgccagcgacgcgctccgcttcatgatcttcgttattggcggagagcactttcagctcggtaccgtagccaagttccgagaacagccgcttttcaaacacgtgcgggttattggcgatcaaaatgttggcagccttcagaatacgccctgatgaacggtagttctgttcaagcttgatcacctgcagcgccggaaaatcctggcttaacagcaccaggttctgcggccgcgcgccgcgccacgagtagatcgactggtcatcatcacccaccacggtaaagcgcgcgcgctgccccaccagcagcttcaccagctcatactggctggtgttggtatcctgatactcatccaccagcaggtaacggatcttgttctgccagcgctcgcgcacctcttcatttcgctgcagcagcagcgtcggtagcaggatcaggtcgtcaaaatcgaggacgttgcaggccttcatatgcgcatcatagagcccatagcagtgggcgaagatgcggtcccgttcgcctttcgcgccagccgccgcctgcgccggcgttttcagatcgtttttccagttggagatcgtcgagatcagctgctgcaacaccactttgtcatcttcgatcaacccttcggtgagctctttgagcagcgcgacctggtcggtatcatcgaacaaggaaaagttagatttcattcccagcgcggcgtattcacgtttgatgatatccagccccagggtgtggaaggtggaaatcattagcccgcgcgcctcttttcgccccagcgtttgcccgacgcgctctttcatttcgcgcgcggccttgttagtaaaggtgacggccgcgatatggcgcgcctgataaccgcagccgcggatcaggtgggcgattttattcgtaataacgcgggtcttaccggaaccggcgcccgccagcaccaggcacggtccggtaacgaattcgacggcttgttgttggccagggtttaaacgcatgggaatattgctcaatcttcgaacggggtgtggattgtagcagaaagcgaggccgagatttaccggctgatggtaaagtgtcagccacgcaattcatcccgaggctccggtaatggcaaaaagcgcagcggccctgcatattctggtcaaagaagaaaaactggcacacgacatcctcgccaagctggaacggggcgtcagcttcgatcatctggcgaagcgctactcaaaatgtccgtccggacgccatggcggcgatttgggggagttccagcagggcgcgatggtcgctccgtttgataaagccgtgttcagctgtccgctgctcaaaccctatggcccggtacaaaccaaatttggctaccatatcatcaaggtgctgtatcgccgctagcgcgtgttactatggcgccctgatttatcccaactcaatcaaggcgcaatcatggctaaaacagcggcagcactgcatatcctggtaaaagaagagaaactggctctcgatctgcttgagcagctcaaaaacggcgccgacttcggcaagctggcgaaaaaacactctatctgcccgtcaggaaaacgcggcggcgatctgggcgaattccgccagggccagatggttccggcattcgataaagtggttttctcctgcccggaactggagccaaccggcccgctgcatacccagttcggttaccacatcatcaaagtgctgtaccggaaataataaaaaaacccggggatcttaatctccgggtttttgcctgatggcgcttcgcttatcaggcctactaaacaaatccattcctctatggatttcggcttgccggaaggcggtaaggaagtacatccccaggaacatagattcctatgtgactggggtgtacgtaccgtagccaacgcatcggcaagtcgaaagacgacgaggaatcagccggcaaccgcgatacgcttcatatcggtcatataaccgcgcagttttttacccaccgcttcgatagcgtggctgcgaatcgcttcgttcacgtcacgcagctgagcgttatccaccgcgccttcggcaatcgctttgcccaggtcgccggtctgcagagtggtcatgaactctttcagcagcggtacgcaagcataagagaacaggtagttaccgtactccgcggtatcggagataaccacgttcatttcatacaggcgcttacgggcgattgtgttggcgataagcggcagctcgtgcagcgattcgtagtaagcggactcttcgatgatgccggaatcaaccatggtttcgaaggccagttcaacgcccgctttcaccattgcaatcatcagaacgcctttatcgaagtactcctgctcgccgattttaccttcatactgcggcgcggtttcgaactcggttttaccggtctcttcacgccaggtcagcagttttttgtcgtcgttcgcccagtcagccatcatgccggaagagaattcgccggagatgatgtcatccatatgtttctggaacagcggcgccatgatctctttcagctgttctgacagcgcgtaagcacgcagtttcgccggattagacaggcgatccatcatcagggtgatgccgccttgcttcagcgcttcggtgatggtttcccaaccgaactgaatcagtttttccgcatacgccggatcggtaccttcagccaccagcttatcgaagcacagcagagaacccgcctgcagcatgccgcagaggatagtctgctcacccatcaggtcagatttcacttccgccacgaaggaggattccagaacacccgcacgatggccgccggtcgccgctgcccacgctttagcaatggccataccttcgcctttcggatcgttttccgggtgtacggcgataagcgtcggcacgccgaagccgcgtttgtactcttcacgaacttcggtacccgggcacttcggcgccaccatcaccacggtgatgtctttgcggatctgctcgcccacttcaacaatgttgaagccgtgggagtaacccagcgccgcgccgtctttcatcagcggctgtacggaacgcacaacgtcagagtgctgtttgtccggagtcaggttgacgaccaggtcagcctgcgggatcagctcttcataggtacccactttgaagccgttttcggtcgctttacgccaggatgcgcgcttctcggcgatcgcttctttacgcagcgcataggagatatccaggccggagtcacgcatgttcagcccctggttcaggccctgcgcgccacagccgacgatgactacttttttaccctgaagatagcttgcgccatcggcaaattcatcgcgccccataaagcggcatttgcccagctgagccagctgctggcgcagattcagtgtgttgaagtagttagccatggtgatacctcgtgatgttgtgttgtcgtgcttattgttcggttcgcgttttgcgagaatgaacccactatatgacaggaatttcgttgcgaaaattgatatattcacaacatcacattgcaataactgcaacgttattctcaggggattgagccatggatttacgcgatctgaaaacctttctgcatctggcggaaagccgccattttggccgcagcgcgcgggctatgcatgtcagtccctccacgctttcgcggcagattcaacgcctggaagaggacctcggccagccgctgttcgttcgcgataatcgcaccgtgaccctaaccgaggccggcgaagaactccgcacctttgcccagcagactttattgcagtatcagcaactgcgtcacgccatcgaccagcaggggccgtcgctctccggcgaactacatattttctgctccgtgaccgccgcttacagccatctgccgccgattctcgatcgctttcgcgccgcgcatccttcggtagagataaagttatcgaccggcgacgccgctgatgcgatggaaaaagtggtcactggggaagccgatctggccattgccggtaagccggagacgctgccaggttcggtggcgttttcgatgctggaaaatcttgcggtggtactgattgccccggcgttgccctgcccggtgcgcaatcaggtgacggtcgaacatcccgactgggcaacggtgccgtttatcatggccgatcagggcccggtgcgccgccgcatcgagctgtggttccgccgccataaaatcagcaatccattcatttacgccaccgtcggcggccatgaagccatggtatcaatggtcgccctcggctgcggcgtggcgctactgccggaagtggtgctggaaaacagccccgagccggtccgcaatcgcgtgatgatcctcgatcgcagcgatgagaaaacgccatttgagctgggcgtctgcgcacaaaaaaagcggctgtacgagccgcttattgatgcgttctggaaaatcctgcctaaccactagcccgcgaggaaaaagcggaacgccgggttatgggtttcgtcatgacattcgtagcccagttcattaagacgggtttcgaagtccggctcatgctcgccaagctcaaacgccgccagaacgcggccaaaatcggtgccgtggctacgatagtggaacagcgaaatattccagtgggtgccgagggtgtggagaaacttgagcagcgcgcctggtgattccgggaactcgaagctaaacaggcgctcctgcagcggtttagacggccgtccgccgaccatatagcgcacgtgcagtttcgccatttcgtcatcggaaagatcgaccacgctgtagccgccttcgctcagtaaatcgaggatctctttacgctcatccagcccgcggctcaaccgcacgccaacgaaaatacaggcatctttggcatcggcaaaacggtagttgaactcggtgactgaacggccgcccagtagctggcagaacttaagaaaactccccttctcctccggtatcgtcaccgccagcagcgcttcgcgctgctccccgagctcgcaacgctcagaaacgtagcgtagtccgtggaagttaacgttggcgccggacaggatgtgagccagacgctcgccgcggatgttatgctgggcgatatactttttcatccccgccagcgccagcgcgccggagggctccgctaccgcccgcacatcttcgaacagatctttcatcgccgcgcagatagcatcgctatcgacggtgatgatgtcgtccagatactcctggcatacacggaacgtttcatcgccgatgcgcttcaccgccacgccttcagcgaacaaaccgacgcgcggcagatccaccgggtgaccggcatccagcgccgctttcagacacgccgaatcttccgcttcgaccgctatcactttaatctgcggcatcagctgcttgataagcaccgccacgcctgccgccagaccgccgccgccaaccgggacgaatacgcggtcaatgtgggcatcctgctgcagcagctccagcgccagcgttccctgaccggcgatgaccatcgggtgatcgaacggcggcacccaggtaaacccctgctgctgcgccagctcaatcgcgcgggctttcgcttcgtcaaagttggcgccgtgtagtagcacttcgccgccaaagccgcgaacggcatcgactttgatatcggcggtcgctaccggcatcacgatcagcgccttaacacccagccgggaggcagagaacgccacgccctgcgcatgattacccgccgaagcggtgatcacgccatttgatttttgttccgccgtcaggccggacatcatcgcgtaggcgccgcgcagcttaaagctatgcaccggctggcggtcttcgcgtttcaccagaataacgttatccagccgcgaagagagcttatccattttttgcagcggcgttttctgcaccgcttcataaaccggcgcgcgcagtaccgcccggagatactccgccccctcaggggcggcggataggggttgcgactcggccatgattaacccccaagttttgatttatcgcgcacggcgcccttgtcggcactggtcgcgaggctggcgtaagcgcgcagcgcgaaggagacctggcgctcgcggtctttcggcgtccacgccttatcgccacgcgcttcttgcgcttcgcgacgggcggcgatttcggcatcgctgagctgcagctgaataccgcggttcggaatatcgatagcaatcatgtcgccatcttcgatgatcgcgatgttgccgccgctcgcggcttccggcgatacgtggccgatggaaagcccggaggtgccgccggagaaacggccatcggtgatcaacgcgcacgctttgccaagccccatggacttcaggaaagtggtcggatagagcatctcctgcattcccggcccgcctttcggcccttcatagcgaataaccacgacgtcgccttccacgactttgccgccgaggatggcctcaaccgcttcatcctggctttcatatactttcgccgggccggtaaatttcaggatgctatcgtccacgccggcggttttgacgatacagccgttttcggcaaagttgccatacaggaccgccaggccaccgtctttactgtaggcatgttccagagaacggatacatccctcggcgcggtcgtcatccagcgtatcccagcggcaatcctgcgagaacgcctgggtggtacggatccccgccgggccggcgcggaacatttttttcaccgcgtcgtcctgggtcaccatcacatcgtactgttccagggtctgcggcagggtcaggccaaggacgtttttgacatcgcggttgagtaaaccggcgcgatccagttcgccgaggatccccagcacgccaccggcgcggtgcacgtcttccatatggtatttctgcgtactcggcgccactttgcacagctgcggcactttgcgggacagcttgtcgatatcactcatggtgaagtcgatttcggcttcctgcgccgccgccagcagatgcagtacggtattggttgagccgcccattgcgatatcgagagtcatggcgttttcaaatgccgccttgctggcgatattgcgcggcagagcggaggcgtcgtcctgctcgtagtagcgtttagtcagttcaacgatacgtttaccggcgttgaggaacagcgctttacggtcggcatgagtcgccagcagagaaccattacccggctgcgacaggcctaatgcttcggtcaggcagttcattgagttcgcggtgaacatccccgagcacgaaccgcaggtcggacaggcggaacgctccacctgttcgctctgatcgtcagagactttcgggtctgccccctggatcatggcatcaaccagatccaacttgataattttgtcagacagcttggttttcccggcttccatcggaccgccggagacaaagatcaccggaatattcaaacgcagggaggccatcagcatccccggggtgattttgtcgcagttagagatacagaccatagcatcggcgcagtgggcgttaaccatgtactcgactgaatcggcgatgagctcgcgggatggcagtgaatagagcatacccccgtgccccatggcgatcccatcatccaccgcgatggtgttgaattctttagcaacgccgccagcagcttcaatttgctcggcaaccagtttgccgagatcgcgcagatgcacgtgccctggtacaaactgggtaaaggagttaacaacggcgatgatcggtttgccgaaatcggcatcggtcattccggttgcgcgccacagcgcgcgggcgcccgccatattgcggccatgtgtggtggtggcggaacggtacttaggcatgctctttttactcccatctctgtttatgcaatgggacggtgcgtgccgtcccatttttaatcacttactaaccggatccagccaaccccatttatcttccgtttcaccggtgaagaggccaaagaaggcttcctgaatgcgtttggtcaccgggccacggcggcctgcgccaacctggataccgtcaacgctgcgtaccggcgtgatttccgcagcggtaccggacatgaacacttcatccgcgaggtacagagattcgcgggacagcacctgctcgcggacttcgataccgagatctttcgccagtttgatgatggcgtcgcgggtgatacccggcagcgcggaagaggtaaacggcggagtaaacagcacgccatctttcacctcaaacaggttttcgcctgcgccttcggagatatagccgttaacgtccagcgcgataccttcctgataaccgtgacgacgcgcttcgctgccgaccagcagagaggagagatagttgccgcccgctttcgctgcggttgggatggtgtttggcgccgcgcggttccaggaagaaaccatcgcatcgatcccctgctccagcgcttctgcgccaaggtatgcaccccacgggaacgccgcgatgataacgtcggttttatagccgtccggcgggttaacgcccatgccaacatcgccaacaaacaccagcggacggatataagcgctggtcagtttattggtacggataacttcgcggcaggcttccatcagctcgtcaacgctctgagaaaccgggaaacggtagatttttgctgaatcatgcagacgctgcatgtgttcacgatggcggaacaccactggccctttgtgagaatcgtagcagcggataccttcgaataccgaagtcccgtagtgcaacgcgtgggacatgacgtgtactttcgcctcgccccatggggtcatctcgccattgaaccaaatgtaatcagctttcttcgtcgtcattgtttttattcctctgcgctcaggcgcggatttgttgtgatgtgggttgctggatctcgacgcaggcgacgtcgaccagtttgcgtaactgactaaacagtaattcgacgggccgctggctggcaacggtcagctcgatatttatgttttgcgcatccgacgcggtttccatattcattgagcaaatttgaaaaccgcgatggcgcaccacgcgcagcacgcgttctaaggtttcggggttgaagcgagcctgtaaagcgacctgatgttgcatcatgataatttctccagcatttctgcattactggcgccgggcggcaccaacggccagacattctcaagttcatcgattgagacatgaagcaggtatggcccctggctcgaaagcatggtgtcgagtgccgcttcaacctggtctttacgggtgatgtgctggcctggaatgccaaaagcgctggccagcgtaagaaaatcaggattatcggtaagcgtggtttcgctgtaacgctcctggaaaaacagctgctgccactggcgaaccatgcctaaacgttggttatccagcagcacgattttcaacggtaattgcttgcgcttaacggtgcccagctcctgcacattcatcatgaaagagccatcgccggagatacagataaccgtatcgtccgggcgagccacctgcgcgccaacggctgccggcagaccaaaacccatggtgccgaggccgctggaagtgatgaagttttccgggcgggtataggtcatgtgctgggccgaccacatttggtgctggccgacatcggtcgtcacgacgcaatccgccggtttgcgatcggaaagctgcttgagcaacagcggcgcgtagattgcctcgccgggatgatcgtaacgccaggcgtgctccgcgcgcagctgtgcgttgtgctcgcgccacgcatcgatggccaacggctgctgcaacgctggcagcatggcgtttaaatctccggttaaggcgacgtgcgcctggcgcagtttgttcagctcagccgggtcaatatccatatggattactttggcgtgcggggcaaaggtattcagcttgccggtcacccggtcatcaaaacgggcgccgacggcgattaataaatcgcactcctgcaccgccaggtttgctgccttggttccgtgcatacccagcatgccaaggtaatacggataatccgcggcgacagcacccaaccctttcagggtgcaggttaccggcatctgcgtcaccgccagaaattcgcgcacggccggtaccgcctgtgccattccaacaccgccgcccacgtacagcattggcttgtgggactgcgcaagcatcgctaacgcctgctcgacttgtgtgtgcgggaactcaacatcatcagggacggtggagaaatgcggatctaattcgcctttagccaactggatatcttttggaatatcaaccagtaccgggccaggacggcctgagtttgccacctggaaagcttccgcaatgacgcgcggcagctcttccaacgactgcacgaggaaactgtgtttggtgcaggccagcgacaaaccaagaacgtccacttcctgaaaagcatcggtgccgataaacggcgccgccacttgaccggtgatggcgacaacaggtacagaatcaagtaacgcgtcagccaaaccggtgatcaggttggtggcgccagggccggaagtggcgatgcaaacaccagttttgccggtcgcgcgggcataaccgatggcggccattgcggcgccttgctcgtgccgacacagcagatgttccacgccgccgtcatacaaagcatcgtaaaccggcataatcgcgccacccggatagccaaataccgtgtcgaccccctgtgttcgcaaagcatgtaccacccactgcgccccgttcatagttacttccccgtcatagatcgggagaaacagaattttatgctataactcatcttctgctcctcgcttatgttttttaagttataaaaaaacccccggacctttcggtgcgggggtcttagttcgttaaggcttgatttctaagcctttcctcgtccaagtgcagccccgcacggtgggataataatcaccaccacgctaatcacgaccaggctaatcactcgtagaagggctgtcattttctgttctttctggcttcttgttcgaaggaatacctaaagagttaccacagacatcacattaagcacaagatttttttatgttccattttctgatcttgctaacgatttttattaaaccagttgtttttaaaaagaaaaaaataaaatgaaaaaaattcagcttattctcgcgtttgcatccgtgttttacggcattaaaacggcgtcatgacggatttgcgtatgccctcccaaaataataaaaatgcaaaactttgcagacaattgtctggaacaggcgtcgtaaagttaaatattcccaggttcatgaaactctatgaatagacataatcattccgctcaggaggcgttatgtcactcgcaattgtctatacccgcgcggcgctcggggtcagcgcgccgctaattaccgtcgaagtccacatcagcaacggactacccggtttgacgatggtcggtctgccggaaaccacggtaaaggaagcccgcgatcgggtacgtagcgccattattaacagcggctacagctttccggcaaagaagataaccataaaccttgccccagccgatctgtcgaaagagggcgggagatatgatttacctatcgctctcgcgctcctggtcgcttcgcagcagcttgccgccccgaaacttaatcagtatgagtttattggcgaattagcgcttacaggcgcgttacgcggcgttcctggggcaatatccagcgctatggaagcgataaaagtcgggaggcagattgtcgttgctggagataacgccgaagaggtcggcttgattaacggcaatgagtgccttatagcaggccacctgcaggaagtctgtgcgtttctggaagggaaacatactctgcagccgccgactggtgaaataactgcgggagaggacgattatgacgatctcggcgatgtcattggccaacagcagggaaaacgcgcgctggagatagtcgcagctggcggtcacaatttactcttgatgggtccaccgggtacagggaagacgatgctcgccagccgtttgccggggcttttaccgccactaagcaaccaggaagcgctggaaagcgctgctatcctcagcctcgtcaatgctcattacgttacgcgtcagtggcgtcggcggccttttcgtgcccctcaccacagcgcttcgctaacggcgatggtcggcggcggctcaatccctgcccctggggagatctccctggcgcataacggtattctgtttcttgatgaactacctgaattcgagcgtcgggttctggatgcactacgagagcccattgaatcaggaaaaattcatctttcccgcactcgggctaagattgactatcctgcgcgatttcagttgattgccgccatgaatcccagcccaacaggacattaccagggtcagcataatcgggccacaccggaacagaccctgcgctatctgggccgattgtcagggccatttctcgaccgcttcgatctctcgcttgagattccacttcctccaccgggcgtattaagccggggtggcgttggcgaagagcgaagcgccaccattcgtctacgggtattcgcggcgcgcgacagacagctcgcacggcagaataaacttaatgcacaactggacagcggggagataaaagtctggtgcaagctgaaagaagacgacgcgatatggctggaacagacgctctcactgttagggctttcaatccgcgcatggcaacgtttactgaaagttgcgcgtactatcgccgatcttaatgaggatagggatatcgaacgtcatcatttgcaggaggcgttaagctaccgggctatcgaccgtatgttaaatcacctgcagacgctgatggcataaaaaaagggctttcgccctttttttttaatcgtcgctttcagtgtagtcttcagcgccttcaacctgcggcttaccgccagataaggtgtgaaaacgcttcggacgtttgattcgcgccatatacttaatccaaacgcgttccgcttcggtcaccggctcacgttcgccgtggcataccgcaacgaattgtttttcatcttcggtaacaggctcgcgtttgcccaattccagctcattaaaggcgtaaccatgacgttcaagcagttgcgcctctttgatggtgaaatcaccgtgacgggagaacccgcgtggataatttttattgtcgaaaaaacgattagtcgtcgtaaagctttccgccatcctacacgctcctgattctttggccgagctatttatggcgcggagtattagttacgcttgacagagcgtcaaacaaaacatttaaatcatcacgacaaataattttgcggagaagagtgtggacacggaattgctcaaaactttccttgaagtgagcagaactcgccactttgggcgggcagcggaagcgctttatttaacacaatcagcggttagcttccgcattcgtcagttggagaaccagctgggcgtaaatttattcacccgccatcgtaacaatattcgcctgacgtcagccggtgagaaactgttgccctatgccgaaacgttgatgaatacctggcaggccgcgcgtaaggaggtcgcccactcttctcgccataatgagttttcgatcggtgccagcgcgtcgctatgggaatgcctattgaacggttggctggggacgctctacaaagatccctataatctgcaatttgaggcgcggatagctcaacgccagtcattagtgaagcagttgcatgaacgccagctcgatctcctgatcaccacagaatcaccgaagatggatgaattaagcagccagttattgggtcatttcaccctggcgctctattgtgccgcgccgggaaaaaataagaatgatttgaactacctgcggctggaatggggaccggacttccagcaaaacgaagtgggtttgatcggcagcgatgatgtaccgctactgacgacgagctccgcagaactggcttatcaacagctcactaccttgaatggttgtacctggttacccgttagttgggcacagcagaaaactggcctgcacacggtgaccgatagcgcgaccctttcacgtcctctgtatgccatttggctacaaaatagcgataagcaggcacatattcgcgagatcctgaaaagcaggatcctggaatagcgatctgactccatggatggagtggctaaaaactggaaaggcagagtgatgggagaaattaaagacaaaaaaaatcctttgccgaagcaaaggattatatatggcaggggcggagagactcgaactcgcgacacccggttttggagaccggtgctctaccaactgagctacgcccctaaatctttctcgctattaagcccgctaatatagcaggcttaatataaataagtggcggaacggacgggactcgaacccgcgaccccctgcgtgacaggcaggtattctaaccgactgaactaccgctccaccgaattttttctacatctaccggtttaatgccccggttttactgcaaatttgatgcctggcagttccctactctcacatggggagaccccacactaccatcggcgctacggcgtttcacttctgagttcggcatggggtcaggtgggaccaccgcgctattgccgccaggcaaattctttgtgctcgtcctgtgtcttttgcgctcatactgcgttggctgctctcgcgaatgtcagtcacatacttcagtatgctccttccatcgcttcgtttgccgccttgtctcagcgcaaaatccttcggactctgaatctaagctgaaaatcgtctcaaatcgccaaaacaccttcggcgttgtaaggttaagcctcacggttcattagtatcggttagctcaacgtatcgctacgcttacacacccgacctatcaacgtcatcgtctttaacgttccttcaggagacttaaagtctcagggagaactcatctcggggcaagtttcgtgcttagatgctttcagcacttatctcttccgcatttagctaccgggcaatgccattggcatgacaacccgaacaccagtgatgcgtccactccggtcctctcgtactaggagcagcccccctcaattctccagcgcccacggcagatagggaccgaactgtctcacgacgttctaaacccagctcgcgtaccactttaaatggcgaacagccatacccttgggacctacttcagccccaggatgtgatgagccgacatcgaggtgccaaacaccgccgtcgatatgaactcttgggcggtatcagcctgttatccccggagtaccttttatccgttgagcgatggcccttccattcagaaccaccggatcactatgacctgctttcgcacctgctcgcgccgtcacgctcgcagtcaagctagcttatgccattgcactaacctcctgatgtccgaccaggattagctaaccttcgtgctcctccgttactctttgggaggagaccgccccagtcaaactacccaccagacactgtccgcaaccccgattaggggccaacgttagaacatcaaacattaaagggtggtatttcaaggttggctccacgcagactggcgtccacgcttcaaagcctcccacctatcctacacatcaaggctcaatgttcagtgtcaagctatagtaaaggttcacggggtctttccgtcttgccgcgggtacactgcatcttcacagcgagttcaatttcactgagtctcgggtggagacagcctggccatcattacgccattcgtgcaggtcggaacttacccgacaaggaatttcgctaccttaggaccgttatagttacggccgccgtttaccggggcttcgatcaagagcttctccttacggataaccccatcaattaaccttccggcaccgggcaggcgtcacaccgtatacgtccactttcgtgtttgcacagtgctgtgtttttaataaacagttgcagccagctggtatcttcgactgatttcagctccacccgcaggggcttcacctacatatcagcgtgccttctcccgaagttacggcaccattttgcctagttccttcacccgagttctctcaagcgccttggtattctctacctgaccacctgtgtcggtttggggtacgattcaatgttacctgatgcttagaggcttttcctggaagcagggcatttgttacttcagcaccgtagtgcctcgtcatcacacctcagcgttaaaaggtaccggatttacctggaacctccgcctacatgcttaaaccgggacaaccgtcgcccggctaacatagccttctccgtccccccttcgcagtaacaccaagtacaggaatattaacctgtttcccatcgactacgcctttcggcctcgccttaggggtcgactcaccctgccccgattaacgttggacaggaacccttggtcttccggcgtgcgggcttttcacccgcattatcgttacttatgtcagcattcgcacttctgatacctccagcaaccctcacaggccaccttcgcaggcttacagaacgctcccctacccaacaacacatagtgtcgctgccgcagcttcggtgcacagtttagccccgttacatcttccgcgcaggccgactcgaccagtgagctattacgctttctttaaatgatggctgcttctaagccaacatcctggctgtctgtgccttcccacatcgtttcccacttaactgtgactttgggaccttagctggcggtctgggttgtttccctcttcacgacggacgttagcacccgccgtgtgtctcccgtgataacattcttcggtattcgtagtttgcatcgggttggtaagtcgggatgaccccctagccgaaacagtgctctacccccgaagatgaattcacgaggcgctacctaaatagctttcggggagaaccagctatctcccggtttgattggcctttcacccccagccacaagtcatccgctaatttttcaacattagtcggttcggtcctccagttagtgttacccaaccttcaacctgcccatggctagatcaccgggtttcgggtctataccctgcaacttaacgcccagttaagactcggtttccctgcggctcccctatacggttaaccttgctacagaatataagtcgctgacccattatacaaaaggtacgcagtcacaccataaaggtgctcccactgcttgtacgtacacggtttcaggttctttttcactcccctcgccggggttcttttcgcctttccctcacggtactggttcactatcggtcagtcaggagtatttagccttggaggatggtccccccatattcagacaggataccacgtgtcccgccctactcttcgagttcacagcctgtgcattttggtgtacgggactatcaccctgtaccgtcggactttccagaccgttccactaacacacaagctgattcagactctgggctgctccccgttcgctcgccgctactgggggaatctcggttgatttcttttcctcggggtacttagatgtttcagttcccccggttcgcctcgttaacctatgtattcagttaacgatagtgcaacgaattgcactgggtttccccattcggacatcgccggctgtaacggttcatatcaccttaccgacgcttttcgcagattagcacgtccttcatcgcctctgactgccagggcatccaccgtgtacgcttagtcgcttaacctcacaacccgaagatgtttcgtaaaacacccacgtgtcgcgaaaatttgagagactcgaacacacattgactgtgtgtcgtttcaattttcagcttgatccagatttttaaagagcaaaacttcgcagtgaaccttttcaggtacactctgaagttttctgtttttgcagtaaggatggtggagctatgcgggatcgaaccgcagacctcctgcgtgcaaagcaggcgctctcccagctgagctatagccccatcgaatgaatctcttttaacctttaattcgttttcgggcgcggcgtggtgaagcgaagcatactgaagtatgcgagctttgccacaacaaagcacgagagcgaatttggtaggcctgagtggacttgaaccaccgacctcacccttatcaggggtgcgctctaaccacctgagctacaagcctgcagagattacttactgctgtattttcatcagacaatctgtgtgagcactacaaaggcaggttctttaaggtaaggaggtgatccaaccgcaggttcccctacggttaccttgttacgacttcaccccagtcatgaatcacaaagtggtaagcgccctcccgaaggttaagctacctacttcttttgcaacccactcccatggtgtgacgggcggtgtgtacaaggcccgggaacgtattcaccgtagcattctgatctacgattactagcgattccgacttcatggagtcgagttgcagactccaatccggactacgacatactttatgaggtccgcttgctctcgcgaggtcgcttctctttgtatatgccattgtagcacgtgtgtagccctactcgtaagggccatgatgacttgacgtcatccccaccttcctccagtttatcactggcagtctcctttgagttcccggccggaccgctggcaacaaaggataagggttgcgctcgttgcgggacttaacccaacatttcacaacacgagctgacgacagccatgcagcacctgtctcagagttcccgaaggcaccaaagcatctctgctaagttctctggatgtcaagagtaggtaaggttcttcgcgttgcatcgaattaaaccacatgctccaccgcttgtgcgggcccccgtcaattcatttgagttttaaccttgcggccgtactccccaggcggtcgacttaacgcgttagctccggaagccacgcctcaagggcacaacctccaagtcgacatcgtttacggcgtggactaccagggtatctaatcctgtttgctccccacgctttcgcacctgagcgtcagtctttgtccagggggccgccttcgccaccggtattcctccagatctctacgcatttcaccgctacacctggaattctacccccctctacaagactctagcctgccagtttcgaatgcagttcccaggttgagcccggggatttcacatccgacttgacagaccgcctgcgtgcgctttacgcccagtaattccgattaacgcttgcaccctccgtattaccgcggctgctggcacggagttagccggtgcttcttctgcgagtaacgtcaatcgccaaggttattaaccttaacgccttcctcctcgctgaaagtactttacaacccgaaggccttcttcatacacgcggcatggctgcatcaggcttgcgcccattgtgcaatattccccactgctgcctcccgtaggagtctggaccgtgtctcagttccagtgtggctggtcatcctctcagaccagctagggatcgtcgcctaggtgagccattaccccacctactagctaatcccatctgggcacatctgatggcatgaggcccgaaggtcccccactttggtcttgcgacgttatgcggtattagctaccgtttccagtagttatccccctccatcaggcagtttcccagacattactcacccgtccgccgctcgtcacccgagagcaagctctctgtgttaccgctcgacttgcatgtgttaggcctgccgccagcgttcaatctgagccatgatcaaactcttcaatttaagtttgatgctcgtgaattaaacttcgtaatgaattacgcatgttcactcagagacttggtattcatttttcgtccgaggacgttaagaatccatgtcactttgagtgcccacacagattgtctgataaattgttaaagagcagttgcgacgcgctttttcgctgcggcgcggggtgtgcatattacgctttcccgcctcagagtcaaccctgaatttcagaatttttctcttcaaccgaaccggctgtttgtgtgaagtgattcacatccgccgtgtcagtggaggcgcattatagggagttctgagacgttgacaagccctgttttcaaaaaacttttcaaccgtcttttttttgcgcaaaacgccattaaagcggtagtttttccagcgtttcaaagccgtaacgctgtaaaacgggtaaaagctgttcagtatccggggtaatcgccatgcaaaaagccttattggcatcattcgatttggcatccggcgcttcatgctccagcagccaggcggtgcgtcgagcaatcgccgcgccggaatcgataaaccgcgttccttccggcataacctgttgcagttcttccgccagtagtgggaagtgcgtacaacctaatacgaccgtatcgggcggttcctgcatccgtagccacgggcgcagaattcgacgcagctcttccaacggtaccgcttcgccgtgcagcttcgcctctgccagttccaccagctcagcggaacccagcatttcgatgcggcactcattggcaaagcggtcaatgagttcacgagtataaggacgcttgacggtaccgcgcgtcgccagcaggccgacaataccgttcgccgttaagcgcgcggcaggtttaatcgctggtacgacgccgaccaccgggaaagcgaacttttcacgtagggctggcagggaaacggtactggcggtattacaggcgatgaccgccagcgccagaggatagcgttgctgaacggcagtcacgatttcaacaacacgctcaacgataaactcttcgctcttctcgccataggggaaggcaacgttatcgaaagcataaatataatgtagatccggcaacagctgccgaatctcgttatataccgacaacccaccgacgccggaatcaaacaccagcacggtgggacgtggatcagaaggtgtagctgccagacaaggtgtattcccgtcctgcagtttggtagccatatactgtctcgtaatctttatcgaacaggttggctattttaccacgaactgtgagatgtgaggtgactggatacgaaactgcgagatcccacaagcttacaccgcccaacttaacgctctcaggcgcataggttaccgggtcgtaagtgttgtcataacgggtgccaagatagtgataggtcacaccccagtcgaaatcataaacctgccagtccagctggtatttcacctgctgttttgcccggcgcaccagcagctcgttggttttcgcatcacgcgcatcgacatagtcatagctgatgctgtgcgccagcggcccggtatcaaacgacgccgtcgcttcaatacctttaatacgcgccttgccgacgttgtaatatttcatcagctgcgagtcgtagtcgatcagattgtcgatgtcgttacgatatccggacagacgccatgtcaccccagacgtcaggccttcaaaggccccttcccactgcttgctctcttccgggtcgagattctgattaccatagaagccgtacagctggccgagattcggcgctttgtaggcggtgccataagaggcgataaagcgatagccgtcgataaactcccacgcggcgctgctctgccaggtaccatgctggccaaactgcgagttatcatcactacgcgccgccccctccagggtgaaatcgcccaacttttgcaagccggtgataaacaggccggtattacggatttcatagccatcggtcacatagttcgtgccaggctcggtggtttgtttttgccagtcgattccagcgccaacgttgccgtggccaacatcgaccgtgttcgcccactgcacattgtactgtttcacttcatccagcgtcgccgaggtgtcatagcgccccagtcgcggatcgtaattgtagtccttactgtggctatagctggaagtcagctgcgagtggaagatatcctgattaaaacgcaggccggcatcccaggtctggctatacaactggcgagtatcgactaatacgccgccataaggagagccgtcgtaggccgtccggttgtcatagccgtacccacgcacaaagccgctccactcattggagaagctatgttccagcgcgccgtagatcgttttgctcataaagccatcgcgatccggctggcgaacgccgccggtattgccttcggcgacaacatcaaagcctttggtataggtatagtcgcccgccagggtgacgcgggtatgtccgccgaaagtctgctgcgtgctgccgccgtagttctggtagccatttgaacccacgccggcattgagcgtggtgccgtcctggtcgcgagtggtaataatgtttaccaccccgccgatcgcatccgaaccgtagaccgccgagcgcgggccacgaacgtattcaatgcgctgtaccagagcgatagggaactggcttaagtcggaagagccgctgacgcccgcctgattcagacgtacgccatccaccaaaattaagacatggctggagttggtgccgcgtacgaaaagagagctctgctgccccatgccgccgttttgcgcgatgtccacgcccggcaggcggcgcatcacatcggtgagagaggttgactgccagcgatcgatatcctgccgcgtcaccacgctcaccggcgccagcacggtctcgataggttgcgccacacggtttgccgtcaccactaacgtatttgaattgctgtcctgcgcccagccggaaaacgccgtgacggataaagccgtcatcagcgaagcttttttaatcattgtaaaagcatccataatatagagaggatgccgccggctctatcagtagctcgcgatgatagaaaccaaatgcgacgtatccggcaggtcttcgggcttggaggctgctttaagaaataatgacttcccacggctaaccgcagtgtctgcaccgagtgcgcttatttctcgcctttccttaccgctgcgcgtcagctccagattcgcactggattccctattaactcagaggaccggttgcaagatgctacaattagaaacatatagatgtccagactgctataacgatatttcatccgcaaccagggctggacatccccaatgctttccctacaatccccgcgtacttattttattcaggatgcatcatgacccccgaacaccttcctaccgagcaatacgaagcgcaactggcagaaaaagtcgtccgtttgcagaaaatgatggccccttttgccgcgccggttccggaggtgtttcgttcgccggtcagccactaccggatgcgcgctgaatttcgcctgtggcacgacggcgacgatctctatcacatcatcttcgatcagcagaccaagtcgcgtattcgcgtcgataccttcccggccgccagcgagctcatcaaccagctgatgccggcaatgctcgacggcgtgcgccataacccggtcctgcgccataagcttttccagattgattatctgacgaccatgagcaaccaggccatcgtctcgctgctctatcacaaaaagctcgacgacgagtggcgccagcaggcggaagcgctacgcgatgccctacgcgcgcaaaatctcaacgtgcagctgataggccgcgccactaaaaccaaaatcgagctcgatagggattatgtcgatgaacgtctgccggttggcgggcgcgaaatgatctatcgtcaggtggaaaacagctttacccaaccaaacgcggcgatgaatattcagatgctggagtgggcgctggacgtcaccaaaggttccaccggcgatctgctggagctctactgcggcaacggcaacttctcgctggcgctggcgcgtaacttcgatcgcgtgctggcgacggaaatcgctaaaccgtcagtcgcctccgcgcaatacaatattgccgccaaccatatcgataacgtgcaaattatccgtatggcggcggaagaatttactcaggcgatgaacggcgtgcgggagtttaaccgcctgcagggtatcgatctgcaaagctatcagtgcgaaaccatttttgtcgatccgccgcgcagcgggctggatagcgagacggaaaaaatggtccaggcctatccacgaattctctatatctcctgcaacccggaaacgctgtgccagaacctggaaaccctcagccagacgcacaatgtcacccgcctggcgctattcgatcagttcccgtatacccaccatatggaatgcggcgtactgttaacgaagaaataaacgcataaaaaaacccggcgaacgcaacgttgccgggttattgcctggcggattactccgccgcggtatctttgcggttgcgcatcttgtaaccgatccagaacaccatcgcgacagacagcaccgccgggaagaagttagagccgatatccggatattctgcgcgcaccacggtgctatacagcagaacgccgagaataaagcaggcggcggaaagccccggcagcccgactggcatactgcggttctgatagcgctggtgcagacagtataccgtcagcagcagcgacagaaccgggaagatggaaaagggaacgattgagctgaacagcgcggcgaaggtgccattaatggacagacccgcgatcagcgccagcagtagcgtacctttatcttgaactgagtgtttcattgctcgtccttcacgttattcggaatgatgtgacattttttcttgttcacggcgataccagtaatacgcgccttttgaaatcattctgagctgcagtaccagccgttcttccagctgtcggcgctgctccggactgacgtccaacgcttccgcaccggcgttgaatacgatggtgaccatagcttcagcctgcgcttcggtaaaggcgcgcggcatatggttttcgagttctaaatagtcggcaagttccgcgatgaaatgctggatctcgcgcgctacagcggctcgaaacgccgcggatgtgccagaacgctcacgcaacagcaggcggaaggcgttcgggttgttaccaataaactccataaaggtagagacggaggtgcggatcacgctgccgcctttcgcaatgcgctggcgcgcctggcgcatcagttggcgcagcattagcccgctttcgtctaccatcgtcaggcctaactcatcgacatcgcgaaaatgacgataaaaggacgtcggcgcgatccctgcttcccgcgcaacctcgcgcaagctcaggctggcaaagcttcgctcagcgctaagttggctaaatgccgcttccaccagcgagcggcgggttttttctttttgttgtgctcttacgcccatcacgatgtatgaatccttccaatagccctgtcggcactataccagagattaaaactaatcggtttgtactggattgtgaatgattgtttatgagccgtttctgcttttatgccgcaaaaaagcacaacgataattgggttaaagctcgccaaatgttatcatcgtgtttattttgtgtataaaacaggtgagtaatgccatgtcacactcttgggattatgatgcaatagtgattggttccggtcctggcggcgaaggcgccgcgatgggactggtgaaacagggagctcgtgttgccgttatcgagcgctaccataacgtcggcggtggttgtacccactggggaaccatcccgtcaaaagcgcttcgccatgccgtcagccgtattatcgagtttaaccaaaaccccctctacagcgaccattcccgtcttctccgttcttccttcgccgacatcctcaaccatgccgacagcgtcattaaccagcaaacccatatgcgtcagggtttctatgagcgcaaccactgcgaaattctgcagggcaacgcccactttgttgatgagcacacgctggcgctggagtgtcacgatggcaccgtagaaacggtcaccgccgagaaattcgttatcgcctgcggctcgcgcccgtatcatccggccgatgtcgatttccaccacccgcgtatttacgacagcgattccattcttagcctgcaccacgaaccgcgccatgtgatcatttacggcgccggggtgatcggctgcgagtacgcgtcgatcttccgcggtatggaggttaaggtcgatctgatcaatacccgcgatcgtctactggcgttcctcgatcaggagatgtccgattcgctctcctatcacttctggaacagcggcgtggttatccgccataacgaagagtacgagaaaatcgaaggcgtcgatgacggcgtgatcatgcatctgaagtctggtaagaagctgaaagctgactgcctgctgtacgccaacggtcgtaccggtaacaccgatacgctggcgctggaaaatatcggtctgcaaaccgacagccgcggccagctgaaagtaaacagcatgtatcagaccgccctaccgcacatctatgccgtcggtgacgttatcggttatccaagcctggcgtcagcggcttacgatcagggacgcatcgccgcgcaggcgctgatcaaaggcgaagcctctgcgcatctgattgaagatatcccgaccgggatctacaccattccggaaatcagctcggtgggtaaaaccgagcagcagctaaccgcgatgaaggtaccttatgaggtaggtcgcgcacagtttaaacatctggcgcgggcgcaaatcgtcggtatgagcgtgggtacgctgaagattctgttccatcgcgagacgaaagagatcctcggcatccactgctttggtgagcgcgcggccgaaattattcatatcggccaggcgattatggagcagaaaggcggcggtaacaccattgagtacttcgttaacaccacctttaactacccgaccatggccgaagcctatcgggtagcggcgttaaacggcttaaaccgcctcttttaacgccttatcgaagtggccatccatagtactgcggatggcctccgccagatgctcatagcggctacgcagtggcgaaccaggacgataaaccagcccgatggtgcgtcttggttccggcttaatgcacggaatatagaccacgccatcgcgttttctctcctgcggcaccgccagcgcaggcagcagcgttataccacttccggcggcaaccatgttacgcagcgtttcaaggctggtcgcgcggaagtgggtatcttcgtccgcacccgcttcaaagcagaagcccatcgcctggtcgcgcagacagtgtccgtcttccagcatcaacagcttttcacccgctaaatccgccatcggcacgcgatcgcgctctgcccacggatggtcttcgtagatagccagcatcatcggctcatcgaacagcggcacttcgataaaggcttcactctctttgaccagcgcgaggatcgcacagtcgagcttaccgctatcgagctgcgccagcagctgatgggtttgcgcctcatgcagatacatttccagcttcgggaaagtctgatgcagcatcggaattatgtgcggcagcaaatatggccccaccgtcgggatcaggccgatatgcagcggcccggacatggtttccccttgctggcttgccatctccttgagcacttttacttcgcgtagcacggtacgcgcctgatccaccagcagcaaacccgcctgagtgaacagaaccttacggctggtgcgctccagtaacatcaccccaagttcatcttccagcttgcgaatttgtccgctgagcgtgggctgactgacgtggcaggaatctgccgcacgtcggaagtggcgatgttcagccagcgctaccaggtattcaagatcgcgaatattcattattcatcctccatcgccacgatagtccatggcgatagatagaatagcaacgaacgattatccctatcaagttttctgttcaataataaccacagaaacgaggagaacatctgaaaatcattgagtcgcctcacagtttccctacccgaacaactaaagccaacgtgaacttttgcggacctcgtgtccgcttttttttgcgtaaaaaagcccggggattacccaggctcattcaacatcggtgtaatctcttacaccaggcgctgtctggcgtcggcaatcgcctgcgccacctgctgcggcgagacgccgcctttggccgcacgtttatcaaggcaggactgcaacgacaggatcgggtagacgtcatcaccgataacgctgctgaacttttgcaagtcgcttaacggtaaatcttccagcgctttgccctgagcaatcgcttcaaccaccgcttcaccgacgatatggtgtgcttcgcggaacggaacgccttttgccaccaggtaatccgccagctcggtagcgttggcgtaaccctgctgcgccgcttccgcacagcgcggacgtttcacctggataccgtccagcaccagcgccgccatgtgcaggcagtcaagccaggtgtccagcgcatcgaacagcccttctttgtcttcctgcatatctttgttgtaggccagcggtagccctttcagggtcatcatcatgccggtcagcgcgccctgcacgcggccgcatttaccgcggatcagttccagcgcatccgggtttttcttctgcggcatcagcgacgagccggaagtaacgcgatcagagagttcaacaaaacccgcttcgccggtattgaagaaaatcagatcttcggcaaaacgcgacagatgcaccatgccaattgaggcatcggaaagcagctccagcacgtgatcgcgatcggagacgctatcgaggctgttacgggtcgccgatgcgaaccccaaccaaccggccagttgttcacggtcgatttcataagcggttcccgccagcgcgccgcagcccagcgggctgacatcgaggcgcttgagcgcgtcctgcaaacggctttcatcacgggccagcatttcaacgtaggccagacaccagtgcgcaaaagtcaccggctgggcgcgctgcagatgggtataacccggcatcaccgcatcctgattgttgccagcggtttccaccagcgcgctttgcagttggcgggtcgcggacagcagctcggtgacggtctctttgcaccacagcttgagatcggtggcgacctggtcattacggctacgcccggtatgcagttttttgcccaactggccgactttatcgatcagtttcccttcgacccagctatggatatcttcggcatcgctttcaaggatttgctgcgggttggcgcgtacctcttccagcaagacgttcagcgcctcttccagctgcagctgctcatcggcggtcagtacgcctacggttaccagcgctttggaccaggcgacggatcccacgatatcctgttccgccagacgatagtcaaagcgtaaagagtcgttgaattgtttgaaccgctgatctgctgcctgtgtaaaacgcccgccccaaagtgccataacatgcttcctttattcgtgagttctgccgggtcgcgctgcgcttacccggtctacggtcttgtcgccccggcaagcaacgcgccgccgggcattcaatcttaagccaaaatacgcgtaccgatcggggtaccgttaaataatgccggcagctgctcggcatggcgccaggaagcgatatccaccgggcggcccagctcgcgcgccgcgtccagcgccgcgttcactttcacgatcatgccgtcggtaataatgccctgttcaatcagttgctcggccctggaggcggtcatttccgcaatccgctgacctttaccgtcgagaatgccgctaacatcggacagcaagataagatccgcgcccaacgttgccgccagcgccgtcgccgcctgatcggcgttgacgttcatcagttgtccttcgtcggtgacgccaatcgagctcacgacaggcaggtagccgcccgccaacagcgtattgataagcgtcggcgagcctgcctgcgctttaccgacgtggcccagttcttcatccaactgagtcaccttcacgctatcgccatcgccgaggaacagccctaccgaggaaagaccatgctttttcgcccatgccagcagcgttttattggccgttcccgccagcgcgccggtaatgatgtcaatctgatcggcaggcgttacgcgcaggccatttttctttttcaccggcagattaagctgtttcatcagctcatccaccacgcagccgccgccgtggacgataaccagcggacgctggtgtgtttcgcggtagtgcaccaaggcggtaaacagacgttccagcgcttcttcgctatccaacaacacgccgccaagtttgataatcaatggattgttcatcatcacaccttaaattaaagactgcgtctcagcgaagccgaaacgaatgttagcgcactgcacggcctgcgctgccgcgcctttcagcaggttatcctctgcggccacgacgataatatgttcgtcctggacggcaaaaccgatatcacagaatggcagcccaactacgtttttcagcgccggtacgcctttatcgtataaacggaccaacggcttattggcataggcctgctggaagacatcagccacctgatctttactgacgcccggcttcaggcggcaggtaatggtttccagaataccgcgtttaaaattgcccaaatggggagtgaagatcacctctgcgcccagatgggtagaaatttccggatggtggcgatgattgaaaacaccgtacggctgcaggctgacttcgcagaagctattgctcatcgccgccttacgcccggcgccgctaacgccgctggtggcgttgatcaccggccattgcttcagatccaacagaccggcatcgatcagcggttttaacgccagctgcgccgccgtcgggtagcagccaggcaccgcgatcaaattcgcctctttcaatgcttctacgttccactccgccagaccgtataccgcctgcttaagcagatcggaatgctgatgcgtgaaaccgtagtatttttcgtagaacgccccatcgttgacgcgaaacgcgccggataaatcgaacaccacgcagcccgcggccaaaaactgcggcgccagatcgtggctgacttcatgcgcggtggcgaggaacaccacatccgcgccggcgctaaattcgctgatatcagacatcgcctgcagcggcaggtcgacaatgcctttcagctgcggatgtatatcggaaattaactttccagcatcattgctttgcgcggagacggtcaaagcggttatgttcatatgagggtggcgatttacataggccaccagctctgcgccggcatagccgctagctcccacgatcagcgtatttagcattggaagagcatctccttacattcgatgggttttattgcgctcaacgatattgtatttttattcacaaatactgcatgaatattgatactatcatgacctgaggtgtgtcaacaatgaaaaacaatttaccgccctttatcgagatttaccgcgcattgatcgccacaccatccatcagcgcgaccgaagaagcgctggatcaaagcaatgagtctttaatcaatttactcggcggctggttccgcgatctgggcttcaacgtcgagatccagccggtacctgagacgcgcaataaattcaatatgttggccagcactggccacggcgctggcggcctgctgctcgccgggcataccgataccgtgcctttcgacgatggtcgctggacccgcgacccgtttacacttacggagcacgacaacaaactctacgggctcggcaccgccgatatgaaaggcttcttcgcgtttatcctcgatgccctgcgcgacgttgacgtcagtaaattgaaaaaaccgctgtatattctggccaccgctgacgaagaaaccagcatggcgggcgcgcgctactttgccgaaaccacacagctgcgcccggattgcgccatcatcggcgagccgacctcgctgcagccggtgcgggcgcataaaggccacatttcaacagcggtacgcgtactgggccagtccggccactccagcgacccggcgcgcggcgtgaacgctatcgaactgatgcacgatgcgattggccgcattatgcaactgcgcgatgatttaaaagagcgttaccactatgccgctttcaccgtgccttatccgacgctcaacctgggcgccattcacggcggcgatgcatccaatcgcatctgcgcctgctgcgaattgcatatggatattcgtccattgccggggatgacgcttaacgacctgaacggcctgctggatgaagcgctggcgccggtcagcgaacgctggccggggcgtctgacggtctctgagctgcatccgccgattccaggctatgaatgcccgccggaccacaagctggtcgaagtggttgaaaaactgctcggcgcgcagaccgaagtggtgaactactgtaccgaagcgccgtttatccagacgctgtgtcctacgctggtgttaggaccgggctccatcaaccaggcccaccagccggatgaatatctggagacgcggtttattaagccgacgcgcgagctcatcactcaggttgtccatcacttctgctggcattaatcgctgctagtttcccgccttcacgtccggaggcgggagagtgacgatcgtcacacttccataagtaatgcttatccgccgaccgctgagttaactttcgcaaattatcgccatttattcgtttgctgaagcgatttcgcagcaattgacgcgggggtatttacgtggctttataaaagacgggttgcttatccactgctcaaatcacggagcgccggatataacaaaataaaatgagatggggtgtctggggtaacatgaacgaacaatattccgctttgcgtagtaatgtcagtatgctcggtaaggtgctgggcgacaccatcaaggatgcgttaggagaaaacattcttgatcgtgtcgaaactatccgtaagttgtccaaatcttctcgcgcgggcaatgaagccaatcgccaggagctgctcaccacgctgcaaaacttgtccaacgacgagctgctgccggtggcgcgcgcctttagccagttcctgaatctggccaataccgctgagcaatatcacagcatttcgcccaacggcgaagccgccagcaatccggaagttattgcgcgtaccctgagaaaactcaaagaccaacccaatctcaacgaagacaccataaaaaaagcggtggaatccctgtcgctggagctggtattaaccgctcacccgaccgaaatcacccgccggacgctgatccataaaatggtggaagtgaacaactgccttaagcagttggataacaaagatatcgccgactatgagcacaaccagctgatgcgccgcctgcgccagctgatcgcccagtcctggcataccgatgaaattcgtaagcaccgcccttctccggtcgatgaagccaaatggggtttcgcggtagttgaaaacagcctgtgggaaggcgtgccgaactatctgcgcgagctgaacgaacagctggaagccaacctcggttaccagctaccggttgattttgtgccggtacgattcacttcctggatgggcggcgaccgtgacggcaacccgaacgtcaccgccgatatcacccgccacgtgctgttgctcagccgctggaaagcgaccgatctgttcctgaaagatatccaggtgcttatctccgagctgtcgatggtcgaatgcaccgacgagctccgcgatttggcgggtgcggaaggcgcgcaagagccgtatcgttatctgatgaaaaagctgcgtagccagttgatggagacccaggcctggctggaagcgcgtctgaaagggcaaaaactgccgaaaccggcggggcttatcacgcaaaacgaacagctgtgggaaccgctgtatgcctgctataaatcgctgcaggcctgcggaatgggcatcatcgccaacggcgaactgctcgataccctgcgccgggtgaaatctttcggcgtaccgctggtgcgtatcgatatccgtcaggaaagtacccgccataccgaagcgctgggcgaaatgacccgctatctcgggatcggcgattatgaaagctggtcggaagccgacaagcaggctttcctgatccgtgagctgaactccaaacgcccgctgctgccgcgtcagtgggagccgagcgaagagacccgcgaggtcctcgacacctgtaaagtgatcgccgaagcgccgcgtggatcgatcgccgcttatgtgatctcaatggccaaaacgccgtccgacgtgctggcggttcatcttctgctaaaagaagccggtatcggctttgccctgccggtcgcgccgctgtttgaaacgctggacgacctgaacaacgccaacgacgttatgactcagttactgaatattgactggtatcgcggctttattcagggcaagcagatggtcatgatcggttactccgactcggccaaagatgccggcgtgatggccgcctcctgggcccagtaccaggcacaggacgcgctaatcaaaacctgcgaaaaagccggtattgaactgactctattccacggtcgcggcggctccatcggtcgcggcggcgctccggcccacgcggcgctgctctcgcagccgccgggcagcctgaaaggcggcctgcgcgtcaccgaacagggcgaaatgatccgctttaagtacggcctgccggaagtgaccatcagcagcctgtcgttgtacaccagcgcgattctggaagccaacctgctgccgccgccggaaccaaaaccgcagtggcgcgaaatcatggccgagctgtccgacgtctcctgcaagatgtaccgcggctacgtgcgggaaaacaaagacttcgtcccttatttccgctccgcgaccccggaacaagaactgggcaaactgccgcttggctcgcgcccggcgaagcgtcgcccgaccggcggcgtcgagtcactgcgcgccatcccgtggatcttcgcctggacccagaaccgcctgatgctgccggcctggttgggcgccggtgccgcgctgcagaaagtggtcgagggcggtaagcaaagcgagctggaaagcatgtgccgcgactggccgttcttctcgacccgcctcggaatgctggaaatggtctactcaaaagccgacctgtggctggcggagtactacgatcagcgtctggtgaaaccggaactgtggaagctaggcgaagagctacgtcagctgttaaccgccgatatcaaagtggtgctggctatcgctaatgactcccacctgatggccgacctgccgtggatcgccgaatccatccagttgcgtaacatctataccgacccgcttaacgtcctgcaggccgaactgttgcaccgttcgcgccaggctgaagaggctggcgaggaaccggatgcgcgcgttgagcaagcgctgatggtcaccattgccggcgtcgcggcagggatgcgtaataccggctagtcaccgtttcccccggtcgcccggccgggggattttccctctcattttagtgatgcaacatctcatcgacgatctgctctttatgcagcgcatagggataataggtcggccagttatccatctctttcagcaaggcctcctgtgattcattgcccataaatatatggaaatgctgcgatttgcgcgggccaataatatggtcgctgaactggacgaatttcggcgcgttaccatcgccctgttggcactcaaacagatagcgaacgcccttcttgccggaggcgtattgcaggattttgtagcctgagtaggtatatttgcagctattaacggtcttgccgacgtggaactctatcacgtcatcttcgatgccaatctgctccacgtcggtggcgtaacccttcttataataggcgcgatactcttccacgctcttgccgccgggctttttcgccttctgctccagaaccggatcaaggtcgccattcagcaggtacggattaacggactgccagacgccatcccaatcgctcaacgcgcgatccttcacatctttatcggcaaaaatgccttcgctagcctggcgttctatgtcggtcaacgctgggccatggctatggttaccgtgggcgaacgcctggacgctcgcaagcgccatgcctaagccaaacgcgagcatggggatctttcgggtcattactctctcctgagttcaatatcgattgcgataaaatgttacgatataacatatcttaatcaagaagcaataacgacaagctcgcgcttttaccgctggaaaaatgtccggtatgatgaaatgcgtggcgttttggcggggtaaagatggataacagcatcaatcagctcattgattcattcgtgaaaaaacaaacctgcattgcagaagtgcattttaccggtgagtcacgcccccctgccgacgccgcgatcaaggttgattttcctcgtctgaatattgtcattgaggggcagttgtacgatctcgccctcggcgataatgccgcgccgctgcagccgcgcgatgtattgtatattgcgggcgatagctggaactggccgcaatggcagacaccctgcctgctattaagcatcttgttcggcaaacagcagttggaattttcgctgcagcgctggagcggcgaggcgctaactcttgtccagaagatccaggtaccgcgccgcgggccgcgcgtgggttcattcctgctacaggcgctaaatgaaatacgtatgcagccgcaggaacaacaaaccgcccgcagcatcgtgattagcctactcagccactgtaccgatctgctgggtagtcaggcgcaaacttcatcgcgcagccaggcgctgttcgaagcgatccgccagtatatcgatctccatttcgctgagccgctgagccgggaatccgtggcccagtcgttttacctatcccccaattatctctcgcacctgtttcagaaatgcgggcccatgggttttaacgaataccttaatcatattcgcctcgaacaggcgcgcatgctgttgaaaggccatgatatgaaagtgaaagacgttgcccacgcctgcggcttcgccgacagcaactacttctgccgtctgtttcgcaagaacaccgaacgttcgccttccgaataccgccgccagtatcacagccagttgacggaaaaatcctctgcgccgtaaaactagatttttgtaagtaactgtctgctgattgctggccacgtacctttataagcaggaacaggcggacaaatgtgatctaaatcatccttaatcgcaatgcgtacatttatccagtttttggcaaatttgtcatctggcgagcaagcaaacgaaaaccgtatcctttcctcaacatcactgaattacacatcgaggaatggttatggaactctatctggacaccgcgaacgtcgctgaagttgaacgtctggcccgcatttatccgctggctggcgtcaccaccaacccgagcatcatcgccgccggcaaaaccccggtttgggacgtgctgccgcgcctgcaaaaagccgtcggcccggaaggtgttctgttcgcgcagaccatgagtcgcgatgcgcagggcatggtggaagaagccaaacgcttaagcaacgccgtgccgggtatcgtggttaaaatcccggttaccgccgaaggtctcgccgccatcaaactgctgaaaaaagaaggtatcccgacgcttggcaccgcggtctatagcgcttcccaggggctactggcggcgctggccggcgcgaaatacgtcgcgccatacgtcaaccgcgtcgacgcccagggcggtgacggcattcgcatggtgcaagaactgcaatctctgctggaaatgcacgccccggaaagcaaagtcctggccgcgagcttcaaaaccccgcgccaggcattggattgcctgttagctggctgcgaagctatcaccctccccttagacgtagcgcaacaaatgctcggcacccccgcggtagagtcagccatagagaagttcgagcaggactggaataacgcatttggcacgttgaacctgtaatccgatcgccagccgccgtccggcggcttgcacggttatcgaggaggaatcgaaatggatcgcattattcaatcacccggtaaatacattcagggcgctggcgccatcaagcgcctcggcgaatatcttaaaccgctggccgaacggtggcttatcatcggcgataagtttgttcttggctttgccgaagagcagttgcgtaccagccttggcggcgctggcctggtggccgaaatcgcaccgtttggcggtgaatgttcgcaaaatgaaatcagccgcctgcgcgatatcgccagcagcgcccaatgccatgcggtgctcggcatcggcggcggcaagactttggataccgcgaaagcgctggctcactatatgcatctgccggtggtcgtggcgccgaccatcgcctccaccgacgcgccgtgcagcgcgttgtctgttatctataccgacgatggggaattcgaaagctatttgatgctgccgcacaacccgaacatggtggttgtcgatacgcagatcgtcgcggccgcgccagctcgcctgctggcagccgggattggcgatgcgctggcgacctggtttgaagcccgcgcctgctcgcgcagcggcgcgaccacaatggcgggcggtaaatgcactcaggcagctctggcactggcggaactctgctacaacacgctggttgaagaaggcgaaaaggcgatgcttgccgccgagcagcatgtggttaccccagcgctcgaacgggtgatcgaagccaacacctacctgagcggcgtcggctttgagagcggtgggctggcggcggcgcacgcgattcacaacggtttgaccgccatcccggacgcccatcacttctatcacggcgagaaggtcgcgtttggtaccctgacgcagctggtgctggaaaacgcgccggtggaagagatagaaaccgcggcggcgttgtgtcacagcgtcggcctgcccatcacgctggcgcagctcgatattaaaggcgacatcccggccaaaatgcgcacggtcgcggaggccgcctgcgccgaaggcgaaaccatccacaacatgccgggcggcgcctgtgccgaccaggtttacgccgcgctactggttgccgaccaatacggtcagcgtttcctgcaagagtgggaataacctgccccaaatgcccggcatttgccgggcataacgcttaacgagtaataccttgcctggtaatctgaggttgacgttttttaaggctgattatcgccagcgccgcgacgatcagcacaataccagcgccttccactagccccggattttcacccagcagccaccaggaaaacagcacgccgcaaaccggtaccgccagcgtactcaggccggcgacgctggcaggcaggttacgcagaacatacagccacagactccaggccaccgccgtcgccaggattgcgctataggccagtgcccaaaaaaccccaggttgccagtcaatgctgcgctgcggcaccagccacgccaccacgctcatcaccagcgcggcatacagcatctgccaggcggttaacgacagtaaatcgaggcgcggatagcggcgatacatgcgtttggcgacaatcgcgctcgccccccaactgatgccggagaggatcgccagcagcgcgcttttcatcgaggagaaatccaactgccagggctgcagcaccagcagtagaccgcacgccgccagtacgatagcggcatattgtagccgccgcatgcgctcgcctaaaaacagcgccgccatgatcaccacccagaacggcatggtatagctgagaatggcgactttacctgcgccgccgctcatcagcgcccactgcgccagaccgaccatgccgcaggtttgcagcagcgcaatcgccagggtgtaaccaaacggcgttggccgcatgccgcgcccgcgcagcgccaacaccgccatcagcacaatcgcgccgaaaatacagcgcagggcggtaaaatcgaaagcgccgatatagagcgttacctgtttcatcgcaatccagctgtagctccagataagcgtcagcaggacgaggccacaaccggccaggagattgctgttccttgcaaccgtcataacttctccaccgtcatgatttttgcgggcactatactctctttggcggcaggttgcttaagggcagagcgcacttttcgtgcgaaaaaagagggcggcgaattgcagctcgccgccccgacaggaataaaaaaataggtaaaacagataattacgctggacgcacgcccagggtatggcaaatggcatagctcatttcggcgcgattcagggtatagaagtggaaatctttcactccttcgcggcttaaaattttcaccatgtccatggcgatattcgcccctaccagttggcgcgtttcggcatcgttatccaacccttcgaacattttcgacatccaggtcggaatacgcacgttcgtcatatcggcaaatttcttcgcctgtttaaagttggagactggcagaatgcccggaataatttccacatcgataccggcggagacgcagcggtcacggaaacgcaggtagctttcgacatcaaaaaagaactgagtgatcgcgcgattagcgcccgcttctactttacgtttcaggttcaataagtcggcctgcgcgcttttggcttccggatgcacttccggataggcggcgacggagatatcaaaatcaccgacgtcttttagcagcgtcaccaggtcggcggcgtacatctccggcttgccgctacccggtggcaggtcgccgcgcagcgcgacgatatggcggataccgttgttccagtaatcctgggcaatcgcgcgcagttcatcgcggctggcgtcgatacaggtcaggtgcggcgctgcttccagaccggtgcggtctttaatgcccttgataatgctatgagtgcggtcgcgctcgccggagttcgccccgtaggtgacggaaacaaacttcggcttcaggctgcttaagcgatcgatggatttccacagggtttgctccatttcactggtacgcggcggaaagaattcaaaggacacattaatctggccctggacttccgccaggctctgattcagggcttcccgctgattggcgtgaaaaaagctcataccttacctcatcaatcgcattatatttatcagtcgtgttgcgaacttctatacgtttagacgtccagatgtaaaaatgacggaaaagcgggcgggcgtcaatagaaaaatctgcgtaaacagtgaggaattttcagtcaaagtgaaaaaagttcatctggcgtcaggccaggcgcgttaattatccgcaggatcaaagagcccacgctgccgacgcagcatctcaccctctcagggcagttggtggcgcgggaatgagcataatgaaggccggccctacgggccggcctgagaggagagattacagcaactgcgccagacgattaatatctgactgaatagccccggcggtgacatcgcgacccgcgcctggcccgcggatcaccattggattatcgcgataccagcgactctcgatggcgaagacgttatcgcacggcagcagcgccgccagcggatgttcctgacgcacggcttctaccccgacgcgcgctttaccgttagcatcaaaacgcgccacgtaacgcaacaccagccccatctcacgggcggcttcaaggcgctgcagcatctgttcgttcagctcttcgccgttctcaaagaagtggtcaaccgagccctcttcgcaatgcgccggaaccagcgattccacgcgcacctgatccggctcgatattgtaaccagcttcgcgcgccaggatcaccagcttgcgcatcacgtctttacctgacaggtcaacgcgcgggtccggttcggtcagcccttgctgccaggcctgatccaccagttcggtaaatggcaccgtgccgtcaaactgcaggaacagccaggagagcgtaccggagaagataccgctcagccccaggatggtatcgccgctgtcgatgagatcgcgcaccgtatggttaaccggcaagcctgcgccgacggtggcgttatacagccagtgacgtccggtcttttcgaaggcgtcgtggatctggcgatatttatcgctgctgctggcgcccgccagcttattggcgctgatcacgtgaaaaccgtggctggcgaaatccagatactgatcggccagctgttcgctggcggtcacgtccagcaccactaaatcatcataagggtgcgcgcgcatccacaggaatagcgattcttcatcctgctcaaccgcttcatcttcaaagaatgccaatgcgcgactggcatccagaccttcatagttcagcaggctacggcggctatccaccaccccagccagcaggaactcaaagccggtgcgggcggaaagcgtgctctgctcgcgcgcgaacaactccagccagcgggagccgatattacctttgccaaacagcaccagaccgatgcgtttctcagcgcggaacacggaatgatgcagcccctggatcaggctctcggttgggccggcgcgcagcaccgccaccaggctgatgccctcttccgattgccaggtaaactctactggctgccctttcaactgctgccagaaacggtggcagtgcagcggattgcgggtcacgcccgcgccgaccatcgccaccagcgccagcttctggcgcagacgcagctcgcccggcaggcccgcctcgtccagcagcttcagcgcgctgtcggccacttcagaggtgtaacagaactgcagcagcttacggtcggcatgcacgcccaccgccagcgggcgcagctgcgcgcgtttgaaaatctgatccagctctttatgcgccagtttgaaatcctgaccagccggcacctggaattcaatcaggcagacgtcgtcgtgactggtgacaatacgcgcgccggtgccggatgccagcacgcgctcaatgcgcgtcgaaccctggtccggggtatagctgcagcgcagctgtaaatcgatatcgctgccggaaaccggctgtagcgtacgcgcgtgcagcaccggcgccgccagtcgagccagctcgctggcctcatcaaggcgcagcagcggcagcaggcacgcatctttcactttacgcgggtcggcgctatagaccccggccacatcgctccagatggtgacgcgggagaccccggccagcgcgccaatttgggtggcggagtagtcggaaccgttacggcccagcagcacggtttctccggcattgttgcgggcgataaagccggtcaccaccagccgtttgttggggtgctgcgccatcaactgttgtaacaacgggtaggacaagccttcatcaacctgcggctgcgcggcgcgttccgcgcgcaggaaggcgcgcgcgtccagccaggcggcttcaacgccaaggtgattcagtaccgccgccatcaggcgtgcggaccacacttcgccgtggccgacgacttcagcatataccgcatcggtgatgccgctatccagcaggcccgccagatgttcaagatcgtgaataaacgtcgcgatcagcgcgtcagcggcgtccgccggcaacaggctggcgatcagatccatttgatagcgacgcagcgcttgttgcacctgatgcgcagaaagacgatcggtctggcttagctgcagccagctaatcagctggttggtggtgctaccggcggcagagacgaccatcatatcgcctgcctgcgcatagtcggtcatgattccggcgacgcgcaggtaacatttcgcatccgctaaactactcccaccaaatttgtgcagctgacgacccttcgcccctgcctgcgcaatcacactcatctttattcctcgtttgctgcccggaagccattttccaggtcggcaattaaatcttcaccatcttcaataccggtcgaaatacgcaggagcgtttccgagatccctgccgccgcacgcgcttccggcgccatgcccgcatgcgtcatcgtcgccgcatgggaaatcaggctctcaacgccccccaacgattccgccagcgtaaatagcgataaaccgctcaagaagcgacgcagcgtctgctcatcgccatcgagctcgaagcttagcatcgccccaaaacctttttgctgacgcgccgcaatctcatgcccctggttttccggcagggacggatgatacagctttttcaccagcggctgggttttcagatagtcgactatcgcctgcgcgttgcgctgcgccacttccattcgcggagaaagggtacgcaaaccacgcaataacagatagctatcaaacgccccgccggtgacgccgatattattcgcccaccatgccagttcggtgacagtttcaggatctttggcaatcaccaccccggcgaccacatcagagtggccgttgagatatttggtgcacgaatgcaacaccagatcggcgcccagcgccagcggattttgcaacgccgggctcaggaaggtgttatccaccacactcaccgcgccggcttcacgcgccagcccgcagattttcgcaatatcgaccacccgcagcaatgggttgctcgggctttcgaccagcaccagcttcggttgttccgctagcgcttcacgtaatgcctgttcatcgctttgatcgacaaagcgcacgcgatagcagccgcgtttcgccaggctgtcaaacagacgatagctgccgccataacagtcgtgcggcgccaccagcagatcgcccggtttcaggaacaccgtggtcaccagcagaatagccgacattccggtattggtcagtaccgcgcccgcgccgccttccagttccgccagcgcgcgctgtacgacatcgcgagtcgggttgccgcgacgggaataatcgtgggcgcgaggttcattgaaaccggtgaaattataggtgctggagaggtggatcggcgggacaacgcaaccgtactgttcgtcgtcatttaaaccgctacgcactgcaatggtggcctgtttacgcgtcatgttggacagttcctgggctgttcggtgagaagtcaggcctcagagtaatcattgtcacaatagacgtcaatacatctggacatctaaacttctttgcgtatagattgagcaaacgacaaatagccgttaaaattatatgcattagcgcacgtcggcggcggcttatatcatgtcggaaagcacgctcatacggtaaactacgcgcaattatggtcgggcgtaatgttctggcccttaactaataaacagaggattaaggtatctcatggctgaatggagcggcgaatatatcagcccatacgctgagcacggtaagaagagtgagcaagtaaaaaaaattacggtttccattcctctgaaggtgttaaagatcctcaccgatgaacgcacgcgtcgtcaggtgaacaacctgcgtcacgccacgaatagcgaactgctgtgcgaggcgttcctgcatgcctttaccggtcaaccgttgcctaacgatgaagacctgcgtaaagagcgcagcgatgaaatcccggaagcggcgaaagagattatgcgtgaactgggtatcgacccggatacgtgggaatactaagacataaaaaaagcggaagatatcttccgctttttttatccctcggcctggccagacgaaggatacaaaaaagccgccctgaggcggctttttctggcaacttacttgctgcccgggatgctgaagcgcttgttgaagcggtcaacacggccaccggtagcaacatcacgctgtttgccggtgtagaacgggtggcatttaccgcacacgtcgaggttcaggtcgtgaccaacggtggaacggattttcatgacattaccgcaagaacaggtagcagtaatttcgtcgtaatttgggtgaataccttttttcatgggagaacctcagttaaggccgcgtcgctcttccagccctaacgccagacaccacgcgatattaataatttcccgacgaccttcgcgcagctagcgtaaaccggcttagcgaatttcccgggttttgggatgtttgatgcggcataaagcgcaccaaaggcggcgaatcatacagaatttgaccagcagatgcaaacttatccgcgccaccttcggtaatgtgtatactaacccgccagatttcaagtcaggaagattccatgtccgtcgctcatgtcgccctgcccgttccgctgccccgcacctttgactatttgttgcctgaaggcatcccggtcaaggcgggctgtcgcgtacgcgtgccgttcggcaaacaggagcggatcggtatcgtggtgtcggtcagcgaacgtagcgaactcccgctcgccgaactcaaaccggtcgccgaagcgctggatagcgaatcggtattttcctctaccgtctggcgcatgctgctatgggccgcggattactatcatcatcccatcggcgacgtgctgttccacgcgctgccgattatgctgcgccagggcaaaccggccagcgccgcgccaatgtggtactggtttgcgacggaacagggacaagcgctggatatcaacagccttaaacgctcgccgaagcagcagcaggcgctggcggcgctgcgccagggcaaaatctggcgctatcaggtcgcagaacttgaattcaatgacgcggcgctacaggcgctgcgtggcaaagggctggcggagctagcctgcgaagcgccagcgattcttgactggcggaccagcttcgcggtgcccggcgaacggctgcgcctgaataccgagcaggcgaccgccgtcggggcaattcatagcgcctccgaccgtttctccgcctggctgctggcgggtattaccggctcagggaaaacggaggtctatctgagcgtgctggagaacgtgctggcgcagggtcgacaggcgctggtgatggtgccggaaatcggcctgacgccgcagactatcgcccgcttccgccagcgttttaacgccccggtggaggtgctgcattcgggtctcaacgatagcgagcgcctcgcatcatggttaaaagcgaaaaatggcgaagcggcgatcgttatcggcacccgctcgtcgctgtttacgccgtttaaagacctcggcgttattgtcatcgacgaagaacacgatagctcctataaacaacaggaaggctggcgttatcacgctcgcgacctggcggtatggcgcgcccatagcgaacagatcccgattatcctcggttcggcgaccccggcgctggagacgctctataacgtgcgccagcgcaagtaccgtgagttaaagctgaccaaacgcgcgggcaacgcccgcccggcgcagcagcacgtgctggatttaaaaggccagcagttgcaggcgggcctatcgcctgcgctgattaaccgcatgcgacagcatctgcaggccgacaatcaggtgatcctgtttttgaaccgccgcggtttcgccccggcgctgctatgccacgactgcggctggatagcggagtgcccgcgctgcgatagttactacaccctgcatcaggcgcagcatcatctgcgttgccaccactgcgacagccagcgccccattccgcgccaatgtccttcctgcgggtcgacgcacctggtgccagtgggtctcgggactgaacagctggagcaggcgctggcgccgatgttccctgatgtaccaatctcacgtatcgaccgcgataccaccagccgtaaaggggcgctggagcaatatcttgccgacgtccatcgcggcggcgcacgcattctgattggcacccaaatgctggctaagggacatcatttcccggacgtcaccctggtgtcgctgctggatgtcgacggcgcgctgttttccgccgacttccgctcggcggagcgttttgcccagctctatacccaggtctccggccgcgccgggcgcgcgggcaagcagggtgaagtgatcctgcaaacccatcatccggaacacccgctgctgcagaccctgttgtataaaggctacgatgcgtttgccgagcaggcgctggcggaacggcaaaccatgcagctaccgccgtggaccagtcacgtgctgatccgcgccgaagaccataataaccagcaggcgccgctgtttttacaacagttacgtaacctgttgcaggccagcccgctggccgatgataaactgtgggtactcggcccggtccccgcgctggcgccaaagcgcggcggtcgctggcgctggcaaattctgctgcagcacccttcccgcatacgtctacaacatatcgtcagcggtacgctggcgttgataaacaccctgccggaagcgcgtaaagtgaagtgggtactggatgtcgatcctattgaaggctaagtcttctcttgcgaggcggatcgaaaaattcaacaaccgtcacgtttttcatgaaaattctgtaactctcaggctgtactatctgttaaaaatgttgctgatgtcagcacgcaagggatgtgtctgcgcagtcagcgaggagaaaccaggtgaagcccaaaaaacaaatggttgccgccaccatgaaagacgtcgccctgaaggcaaacgtttcaacggcaaccgtatcccgtgcgctaatgaatcccgacaaagtgtcgcaggcaacccgcagtcgggtggagcaggcggcgcaggaagtcggctatttaccgcagtcgctcgggcgtaacatgaaacgcaatgagtcgcggacgatccttgtgatcgtgccggatatttgcgatcccttcttcagtgaggtgattcgcggcattgaagtgaccgccgccgacgaaggctatctggtgctgatcggcgattgcgcccatcagaatcagaaagaaaaaacctttattgatctcattatcaccaaacaaattgacggtatggtgctgctgagttcgcgcctgccgttcgacgccagcgtcgaagagcagcgtaatttgccgccgatggtcatgtcgaacgagtttgcgccggagctggagctccctactgtgcatatcgataacctgaccgccgcgtttaatgccgttaattatctccacgaactggggcatcaacgtatcggctgtatcgccgggccggaggatatgccgctgtgccattaccggctgcagggatatgttcaggcgctgcgccgcagcggtatcaccgtcgatccgcactacatcgcccgcggcaactttacttttgaagccggggccaacgcgctggagcaactgctggcgcagccggtgccgccgaccgcggtattttgccatagcgacgttatggcgctgggcgcattgtcgctggccaaacgtcgcggcctgagggtgccggaagatttatcgattgttgggtttgataacatcgcgttgtctgaattttgcgatccgccgttaactaccgtttcacagccgcgttttgatatcggccgtgaaggaatgctgctattactcgagcaaatgcagggccgtaacgtcaacagcggctcgcgtctgctcgattgcgaactgatcgttcgcggcagtacgcaaaaaatcagacgataaccatcaggctttcgggcctgctcttctggtcaaaggcccgccgcttaagtaacatggcgggctgacgaacgaatataagacagcgaaacgatagtggcacaacgagattatgtacgccgcagccaaccggctccttcgcggcgcaaaaagagcagcccccgaagctcaaggaaaaagcagagcagccttccggcgatttcaccgactatggttgcgatcgcagcggccgtgctggtggcctttatcggtggtctgtatttcattacccatcacaagaaagaagaagcggaagcgctgcagaaccgtcaggcggcaggcaacggtctcccgccgaaaccggaagagcgctggcgctatattaaagagctggaaagccgccagccgggcgttcgcgcgccgactgagccaaccgccggcggagaagtgatgaaacccgagcagcttaccgacgagcagcgccagttgctggcgcaaatgcaggcggatatgcgtcagcagcctacgcagctgactgaagtgccgtggaacgaacaaacgccggcgcaacgtcagcagacgctgcagcgtcaacgtctggcgcagcaacagcagcaggcgcaacagcagcagtgggcgcagacgcagcagcagaccgcgcagcaacagccgcgcgtccagcagccgaagccggtgcagcaacagcagccgaagcaaaccgcgtccaaccagcagccgtaccaggatctgctgcagacgccggcgcataacaccactgctcagccgaaaacccaggccgccgcgccggtcgcccgcgtagaagaagcgccgaaagccgcggccgccgagaagaaagacgatcgcagctggatggttcagtgtggttcctttaaaggcgccgagcaggccgaaaccgtgcgcgctcagttggcctttgagggctttgcttcgcatatcaccaccaacaacggctggaaccgggtagtgattgggccgctgaaaggcaaagagaacgccaacgatatgatcaaccgtctcaagatggccggacacgcaaactgcattcgtctcgccgccaggggttgaaaccccaaaaatcccccccatctataattgcattctgccccgcgtaacccgcggggcccctattccgcttttgcaaccaaggggtctgctcgtgacaacaatagttagtgttcgccgtaatggccatgtcgttatcgccggtgatggccaggccacgctgggcaacaccgtgatgaaaggcaacgtgaagaaagtgcgtcgtctgtacaacgacaaagtgatcgctggtttcgctggcggcaccgctgacgccttcaccctgttcgaactgttcgagcgtaagctggagatgcatcagggtcatctggtgaaagccgccgttgagctggcgaaagactggcgtaccgaccgcatgctgcgcaaactggaagcgctgctcgccgtcgctgacgaaaacgcgtcgcttatcatcaccggtaacggcgacgtggttcagccagaaaacgatttgattgcgattggctccggcgggccatatgcccaggccgccgctcgcgcgctgctggaaaacaccgaaatgggcgctcgcgacatcgccgagaaagcgttggatattgcaggggatatctgcatctataccaaccacttccacaccatcgaagaattaccttctaaagcgtaaggatctcccatgtctgaaatgaccccacgcgaaattgtcagcgaactggacaaacatattatcggccaggacgcggccaagcgttctgttgctatcgccctgcgaaaccgctggcgccgtatgcagcttaatgaagagctgcgtcatgaagtcacgccgaaaaacattctgatgataggcccgaccggcgtcggtaaaaccgaaatcgcccgtcgcctggcgaaactggccaacgcgccgttcatcaaagttgaagcgaccaagttcaccgaagtgggctatgttggtaaagaagtggactctatcatccgcgatctgaccgacgctgcgatcaaaatggtacgcatgcagtccatcgataaaaaccgctatcgcgccgaagaaatggccgaagagcgtatcctcgacgtgctgatcccgccggcgaaaaataactggggccaggctgaacagccgcaggaaccttccgctgcgcgccaggcattccgcaagaaactgcgcgaaggccagcttgacgacaaagagatcgaaatcgatctcgccgcggcgccgatgggcgttgaaatcatgtcccctccgggcatggaagagatgaccagccagctgcagtccatgttccagaacctgggcggccagaaacagaaaccgcgtaagctgaaaatcaaagacgcgatgaagctgcttatcgaagaagaagcggcgaagctggttaacccggaagagctgaagcaagaagctatcgacgccgttgaacagcacggtatcgtgttcatcgacgaaatcgacaaaatctgtaagcgcggcggcaacgcctccggcccggatgtgtctcgtgaaggcgttcagcgcgacctgctgccgctggtggaaggctgcaccgtctccactaaacacgggatggtgaaaaccgatcacattctgtttatcgcctccggcgcgttccaggtcgccagcccatcagatttgatcccggaactgcagggccgtctgccgatccgcgttgagctgaaagcgctgactacccatgatttcgaacgtattctgaccgagccgaatgcctctatcaccgtgcagtacaaagcgctgatggcgaccgaaggcgtgaatatcgaattcactgaagatggtatcaagcgtatcgctcaggcggcatggcaggttaacgaaaccaccgaaaacatcggcgcgcgtcgcctgcacacggtgctggaacgtctgatcgaagacatctcttatgatgccagcgaaatgaacggccagacggtgaccatcgacggcgattatgtcggtaaacacctggatgttctggtggcagatgaagatctgagccgttttatcctataatccggttcaatgcattttcatcacacacggtggggctatgatagccccatttttttggctgaaagaaatgactgaacaaccgataacacgcactaaggcctggcttgaaagcctgcgtccaaaaacattacctctggctttctccgctatcatcgtcggcaccgcgttggcgtggcagcaaggccacttcgatccgctggtcgcgctgctggcgcttattaccgccggtttgctgcaaattttatctaatctcgccaatgattatggcgacgccgtcaaaggcagcgataaacctgaccgtatcgggccgctgcgcggaatgcaaaaaggcgccatcacccagtcgcagatgaaacgcgcgctgatcgtaacggtagcgctgatttgcctgtccggcctggcgttgctgttctccgcctggcagacaatggcggacttcatcggctttatggtactcggcgggttgtcgattatcgccgctatcacctataccgtcggcacgcgtccttacggctatattggccttggcgatatctcggtgctggttttcttcggctggctgagcgttgtcggcagttggtatctgcaggcgcatagcatcgaggcggttattttcctgcccgctaccgcctgtggcctgctggccgccgcagtgctgaatatcaataacctgcgcgatatcgatagcgaccgcctgaacggtaaaaataccctggcggtccgtctggggccggtgaacgctcgccgttatcacagcgtcctgctgcttggcgctccgctgtgtctggcgctgtttaacctgctggcgctacatagcctgtggggctggctgtttattctcgccattccgctgctggtaaaacaggcgcgttttgtcatgcgtgaacgcgaaccggtggcgatgcgtccgatgctggaacgcacggtcaaagcggcattattaaccaacctgctgtttgtcatcgggattatcggcagtaagctggcggcataactgacaaatatcaattaacaattgatgattttgcaaacaatgcagttcacgggatatactaaaaattctcgcagcaactgaacgttaagcctatgaaatacgatacttccgagctttgcgacatctaccaggaagatgtcaatgtcgtggaaccgctgttttccaactttggagggcggtcgtcgtttggtggacagatcattacggtaaaatgtttcgaggataacgggttgctctacgatctgctcgagcagaatggccgtggtcatattctccttatcgacggcggcggttccgtgcgacgcgcgttaattgacgccgacctggcgcgtctggcggtacagaacgaatgggaagggctggtggtctatggcgcggtgcgccaggttgacgacctggaagatttagatatcggtatccaggcgttagccgccattcctgtggccgctgcaggggaaggtatcggcgaaagcgacgtgcgcgtcaatttcggcggcgttaccttcttctccggcgatcatctgtatgccgacaataccggtatcatcctttccgaggatgcgctggatatcgaataacgcgctcgataacgccctaataaaaaaggccttctcactgagaaggcctttttgttatgccgcgaaacttagtacagtttcttcgcgcaatccatccagtcagacttgaacggacgcttcatattttcgatagcatcgatgatgtcgtggtgaaccagcttctcgttctggataccaacacagcggccgccaaagccctgcagcagcagttcgatggcatatgcgcccatacgggaagccagaatacggtcgtaaggaaccggagagccgccgcgctgaatgtgacccagcacggtcgcacgagtttcacggcccgtttctttctcaatgaagctagccagttcgtcaacgtcgcacatgtgctcggtgatggccacgatcgcgtgtttcttacctttcgcgatgccggctttgatttcagccaccagatcgtcgcgggtatattctacttccggcaccatgatgaactcacagccgccggcaatcgccgccgccagagtcagatcgccacagtagcggcccatcacttccaccacagagatacgctggtgcgaagaggaggtgtcacgcaggcggtcaatcgcttcaacaacggtgctcagcgcggtaaagaaaccgatggtgtagtcagtacctttgatgtcgttgtcgatggtgcccggcaggccgatgcaagggaaacccatctcggtcagacgcatcgcccccatataggaaccgtcgccgccgataacaaccagcgcgtccaggccgcgctttttcatattttcaatggcgactgcgcgaatatgctcttcacggaattccgggaaacgagcggagccgaggaatgtaccgccgcggttgatcatgtcggacacgctgtaacggtcaagctgaaccatacgatcttcatacaggccgaggtaaccgtcatagattccaaaaacttccagaccttccgttaatgccgcgcgcacaacgccgcgaattgctgcgttcatgcccggcgcatcaccgccacttgtcaacacaccgattttcttaatcatgactacctctgaacttaggaagcaaaaaataatcctgttgcctgaagcgctcccataccaggagtgcacgacgataattgcaatagtatatcaaacgcttctggctgaattgattcaggtcagaccaaatggcggtaatttatacaaaaaatgcctacccgccccacatttttacatcgagtttacagactataaccgaaagctcaaaaaacgccctgccgcgccggcggcaccacagaacagggatcctgatggatgatgacatccgatcccgggaaacggcgcaaaatagcctgctccacctggtcggcgatcacgtgcgcctgtaccagcgggaggttatcttccatttccaaatgtatttgaataaagcgagtcggccctgactgccgcgttcgtagatcgtgcgcgccgctgacgccgggccagctgttcacgatactgatgatttcctgacgttcctcatccggaagcgcacggtctaataacgattgcaccgcgtcgtaacccatacgcagcgcgctatataaaatatagatgccaatccctaatgcaaacagcgcatcggcgcggtgccagccgtaccaggagaggccaagggcgataagaatagcgccgttcatcataacatcagactgataatgaagcatatccgcacgcacggcctggctctgggtttttctgaccacccagcgctgaaaggtcaccagcatcagggtgcttatcaaggcgatcagcgtcaccaccatcccgacgcccgccgcctgcatcggttcagggcgaatcagatgctggatcccggtcaggaacagaaacaacgccgaaccagaaataaacatgctctgcgccagcgccgccagcgattccgctttcccatggccaaaagtatgttcttcatcagcaggttgtagcgagtaacgcaccaccagcaggttggtcagcgaggcggcaatatccaccagcgaatccaccagcgccgccagaatactcaccgaaccggtataccaccacgcaaaaattttgatcaaaagtaacacggaggccatcgccgtcgcggcaatagccgcgcgactcaccagccgcccataagattgattcataaacgctccttttccggcgatgcgcttagtataacctgaacttttacccggaagatgaacgggcatgcggcggctgaggcgaaaaaaagacaaaaaaaacccccacatcatgtgggggaagacagggatggtgtctatggcaaggaaaacagggtttgttacttgggttgcacggtactgctactactggaaagcatcatggctgagcctttctgcatccttgcaacctcacgcaactgatccatacgctgctggtgcttagcatttaaaaccgcttgctgctcaggagttagcaggtggtacatctggttgcggactttcgccatttctacctggcgggcaacctgttcctgcgccatcttttctgcctgagcgcgcacagcgctttcatcaaatttatctgcggtgacaaggctatgcattgtctccagttcgctaacattaacagggagccggtcatggcgcgcccgttgcataagatcccgtaactgctgtcgttgctgttcggttagacttatgccgtcaaacatatggctctggccgctgcgctgggctccctcttcaccgtggagccagttaacgccggtaacgacttcagcggcttggctagtagcacttagcgccagcgttgaggccatgacggcagcgataacattgcgcatcacatactcccaaaacgtttgtgtcgcgattcaacgagagacagtttacgattcaggctgcaaacatgcgtcagggggtgtaaaacaacgtaaagtcatggattagcgagccttgatgacgtaatttctgcctcggaggtatttaaacaatgaataaaatcctgttagttgatgatgaccgggagctcacctccctgttaaaagagctgctcgatatggaaggttttaatgtgctcgttgcccatgacggtgaacaggcgctggcgcttcttgacgacagcattgatctccttttgcttgatgtgatgatgccgaagaaaaacggtatcgacacgcttaaagaattacgtcagacacaccagaccccggttatcatgctaacggcgcgcggaagcgagctggatcgcgttctcggcctcgaactcggggcggatgactatttgcctaagccgtttaacgatcgcgagctggtggcccgtatacgcgcgattctgcgtcgttcccactggagcgagcagcagcagaccaccgaatccggttctccgaccctggaagtggatgcgttaagcctcaatccgggccgtcaggaggccaattttgatgggcaaacgctggagctgaccggcaccgagttcaccctgctgtatctgctggcgcagcatctgggtcaggtggtgtcacgtgaacacttaagccaggaagtgctgggcaagcggctgacgccgttcgaccgcgctatcgatatgcatatttccaacctgcggcgtaagctgccggagcgcaaagacggccatccgtggtttaaaacattgcgcggacgcggctatctgatggtttcggcttcatgattggaagtttaaccgcacgcatcttcgctatcttctggctcacgctggcgctggtgttgatgctggtactgatgttgcccaagctggactcgcgccagatgaccgagctgctggaaagcgagcaacgtcagggcatcatgattgagcagcacgtcgaggccgaactggcgaacgacccgccgaacgacctaatgtggtggcgacgcctgtttcgcgccatcgataagtgggcgccgccggggcagcgactgctgctggtcaccagcgaaggccgcgttatcggcgcagaacgcaacgaaatgcagatcattcgtaactttatcggccaggccgataacgccgatcatccgcagaagaaacgttacggacgcctggagatggtcggcccgttttccgtcagggatggtgaagataattatcaactttatctcatccgccctgccagtacttcacaatccgacttcatcaacctgctatttgaccgtccgctattactgctgatcgtgacgatgctggtcagcgccccgctgctgctctggctggcgtggagcctggcgaaaccggcgcgcaagctgaaaaacgccgccgacgaagttgcccagggtaacctgcggcagcatccggagctggaagccggtccgcaggagtttctggccgccggggccagcttcaaccagatggtgaccgcgcttgagcgaatgatgaccagccagcagcggctgctatcagatatttcgcacgagctgcgcacgccgttaacccgcctgcagttaggcaccgcgttgctgcgccgccgcagcggtgaaagcaaagagctggagcgtatcgaaaccgaagcgcaccggctggacagcatgattaacgacctgctggtgatgtcgcgtaatcaggcgaaaaacgcgctggtcagcgagacggtgaaagcgaatcagctgtggggcgaagtgctggacaacgcggcatttgaagccgagcagatgggtaaatcctttaccgttgagtatccgccgggcccctggccgctgtacggtaaccccaatgcgctggaaagcgcgctggaaaatatcgtgcgcaacgcgctgcgctactcgcacacgaaaatttccgtcagtttctcggtggataaagacggaatcacggtcaacgtcgatgatgacggcccgggcgtcagcccggaggatcgcgaacagattttccgtccgttctatcgtaccgacgaggctcgcgatcgcgagtccggcggcaccggtctggggctggcgattgtcgaaacggcgattcagcaacatcgcggctgggttaaagccgacgatagcccgctgggtgggctgcgtttaacaatctggctgccgctgtataagcgtacttaaccctgtcccggcttgcgctacgctgagccgggctactggttgcaacgttcaatatgggggaattatttcccccataatctgcgcgaattatcctcgatctgcccgcttaaacgccgtttctgcatggttctgctccagcttaccgacaggcctgccgccgatagcagacggtgatactggtcgtcatcaaacggcatatgccaggcaatcgcaccagcctcatgcacgctcacgtcgctcagacgcgataccagctccagcggcgcatcgctggaaacccggccgccggcgataatgcggtagagccagccaaccttgccgctgttttgcatcagttgcgccatatcgctaataccgaaatggtaattcagtttgaagcagggagagcgcggttgagtgacctgaattagcgcctcgccccaacgaaagatatcgccgatatagacgtttttttccgttagcccttcggtagaaaggttttcgccgaatgcgggggcgcagaacagatcggcctgctgcgggaattcgcggatccagtcgaggtaatgctcgcggggatagtggcacagcgcgcgatccggcccgccgtgaattttcttttccgcctgctcgtccccttccagcccgagatcgccgagctgtaattcgccatcgacctggattttgccaattgcgctggggcggctaccgtcgtagtccctgattttgccgacaaagacattcaccggataatgcattgctgctctccttgctacggatataaaaaaagcgagtcatcagactcgcttctctcttagcacaatgcaaccttattttttggcggcaaaacgcgctgctgcttcgtcccagttaaccacgtcccagaaggctttgatgtagtccggacggcggttctggaatttcaggtagtaagcgtgttcccacacatccaggccgataatcgggaagccggaagcgccggaaatggcttcgcccatcagcggggagtcctggttagcggtagaaacgacggccagtttgtcgcctttcagcaccagccacgcccagccggaaccaaagcgggttgctgccgctttttcgaattcagctttgaagttgtccacagaaccgaaatcacgctcgatagcggctttcaggtcgccctgcagggtggtgccggttttcaggcctttccagaacaggctgtggttagcgtggccgcccgcgttgttacgcagtacggtttttttgtcagccggcagttgatcaagcttagtgatcagctcttccgcggacaggttagcgaattccggcaggctttccagcgctgcgttagcgttgttaacgtaggtctggtgatgcttagtatgatggatctccatcgtctgcttgtcgaaatgcggttccagagcatcgtaagcgtacggcagggatggcagtgtataactcataatcatctccattattatcgggcggcagagggtgttaacgccgcgtaagcagtcggttcattatagttaattaaatgatattgaaaatgattatcaatgccgtagttttactaaggttatacccaaaatagatacacgccggtttgtgagccaaaacaactcattaagcccctgattgccagagtttcgcctggcgtggcaacagctcaaaggcgtaaaaactgcgcaatttttacactcatcgcatcggagagagtctatccaacccaacacagatgagggtaaaggcaatgaatcatgcgattacgatgggaattttttggcatttaatcggcgccgccagtgccgcctgtttttatgcccctttcaagaaggtgaaacactggtcgtgggaaaccatgtggtcgatcggcgggattgtttcctggctaattctgccgtgggcgataagcgccatgctgctgcccgatttctgggcctactatcgctcatttagcgcttccacgctgctgccggtgtttttgttcggcgcgatgtggggcatcggtaacatcaactatggcctgaccatgcgctatctggggatgtcgatgggtatcggtatcgctatcggtattacgcttatcgtcggcaccttaatgacgccgatcctcaacggccactttgatgtgttgattcacaccaaaggcggacaaatgaccctgctcggcgtgctggtggcggtgattggcgtgggtatcgtcacccgcgccggccagcttaaagagcgcaaaatgggcatcaaagcggaagagttcaacctgaaaaaagggctgatgctggcggtaatgtgcggtattttctccgccggcatgtcatttgcgatgaacgccgctaaaccaatgcatgaagccgccgcggcgctgggcgtcgacccgctgtataccgcgctgccaagctacgtggtgatcatgggcggcggcgcactggttaacctcggcttctgttttattcgcctcgccaaagtgaaggatttgtcgctaaaagccgacttctcactggcaaaaccgcttatcatcagcaacattctgctttccgcattgggcgggctaatgtggtatctgcagttcttcttctatgcctggggccacgccagtatcccggcgcagtatgactacatgagctggatgctgcatatgagcttctacgtactgtgtggcgggctggttgggctggtgctgaaagagtggaacaacgccggacgccgcccggtcagcgtgctcagcctcggctgcgtggtgattatcatcgccgcgaatatcgtcggcctgggaatggctaactgatttccccttacgcggcggcgcgactgcgctgccgccactgtcccggcgtcatgccaatttcccgattaaacaccaccgaaaaatagttactgtcctcaaacccgcactgcatggcgatctcgccgattaaccgctcggtatgctgcagtaaatactgcgcatggcagatccgcagctggcgcaaatagtgagttatcgtcattcccgtttgctggcgaaactgctggcgtaacgcacgttcgctgcagccttcatgcagacagaagctatccagattaaaggggcgattcagacttccggccagcgccgttagcagtttatcgagctgtgtttcgctttgcgtcgccgccaggttatcagtggcgtagcgatagcgctggagcgtcaacaccagttgggcgaacagcagctccgccatgctatccgcctgcgcatcctgccgcgcgctttcgtgctccagctggttaatcacctgcctgacctgcgccatcccgctgctgccgatccgccagtgcggctgccacggcgtgccgaataatcccggaatatgcgccgcccagtcaaaattgagccgcagccgatccgggcaataaataatattctgcagcaccaggtcgttgaccgacgcataagagtgtttatcttccgcgcgaatataaaagagatcgccgcgggtaatccgccacgggcgatcgttgaggatatgcagaccgttgccgcgccacaccagcaccagctcgcaaaattcatgggtatgctcggcaaagacgttttgcgggtagcggtcagccaccgccaccgcctgcgagggggaggcaaaaaactcatctttgcgaagcaccagctgacctaccacaactctcactcccgacgcggaaaccaaccattattcgcattttggtgaggcaatacgttgactcttctcgcgttactgaagaatagcgtcgcgcccctggcgaatatcgcgcggcgaccagtcgaattcacggcgaaatagcgtcgaaaaatggttactgtcgccaaaaccgcagcgataagcgatttctgtcacgctatcatcgctgtggcgcagcaggtgccgcgctttcatcaggcgcacccggttgaggtagcgctggggcgtcagcccggtttgcagctttaactggcgatgcagggtgcgtaaagagagcgaaaactgcgccgctacctcctcccagcatatctcttcggcaaaatggtcttccagccaggccatcagctgattcagccgcgcctcgtggttgccggcgccttccgccaggctgttgctgtgcagtagcaccagtagctgcataaaaaggatttcacggctggcgatggtatgcggctcgacgccagggccgatcttttccatctggccgacgatttgccgcacctgctgcagcaccgtctgattgacccgccagtgtgaaagatagttaccgtcctgctcctgcggcagcagctggttcacgccagtcagaaaacgaaaagcatccggcgcgcggtagagcacgttggtcagacacaggttattggtgtgttcgtaaagatgacgatcgtgatcgcgaataaagcagaccgaaccgccgctgatggtatagggctggccgttgaaaacgtgaatgcccgtaccctgctcgacgataacaatctcatgaaaatcatggtgatgctcagggaaagccgcttgaggaagccgcggttcaatcgccaccgccgagacgccggccttaaagaaatccgtactgtgcaacacggtcatagcagcctccacgaatgagaaaaattatcaaccgtcgtcgcaaatagtaattaagggccggcaatccggccttcaatttttgaccgcaaaccgcgtaaagcctgccgttttttcaagaaccagccggaaatatccggaactgcggccagcatcacaccccgcctcgcgccgcccataaaacgaaactgtgacgcttctcacggtcacctttgctgtgttgccagccgcccgctttcgctgtcagtagcgagaaggtgacgcagagacgccttttttagactgcctgtaatgattttaagaagggtcgtgccatgagtattcgtcattgtgtcgccgttgatttaggcgcttccagcggtcgggtcatgctcgcgaattatgcaaccgcgacgcgatcgctgacgctgcgcgaggttcatcgtttcactaaccgcctgcagaaagtggatggctacgattgctgggatatcgatagcctggaagcggaaattcgttgtgggctggtgaaagtatgcgaacaggggatcctgatcgacagcatcggtatcgacacttggggcgttgatttcgtcttgctggataagcgcggccagcgcgtcggcctgccggtttcttaccgcgatagccgcactcacggcctgatggcgcaggcaatcgaacaacttggccgcgccaatatttactgccgcagcggcatccagtttctgccgtttaacaccctttatcaattgcgggcgctggtcagccagcagccggcgctggcggaacaggtcgcccatgcgctgctgatcccagactacttcagctaccgcctgaccggcgcgatgaactgggaatacaccaacgccaccaccacgcaactggtcaatatcaatagcgataactgggatgacgagctgatccgctggagcggcgcgcagccggactggttcggtacgccgacgcatccgggcaatgttatcggccactggatctgcccgcagggtaaccgcatcccggtggtcgccgtcgccagccacgatactgccagcgccgtgatcgcctcgccgctggcggacaaaaatgccgcctatctctcatcgggcacctggtcgctgatgggctttgaaagtaaaacgccttacaccagccagcaggcgctgaaggcgaatatcaccaatgaaggcggcgccgaggggcgttatcgggtactgaaaaacatcatgggcctgtggctgctgcagcgggtactgcaggagcagaacattagcgatctgcaggcgctgattgtcgacacatcacagctaccggcctgtcgttatttgattgattgcaataacgatcgctttatcaacccggccaatatgagcgccgaaattcaggccgcctgcgcggagtccgcccaaccgatcccggtcactcccgccgaactggcgcgctgcatttttgacagcctggcgctgctgtatgcccgggtattggacgaactggcggcactccgcggccaccctttcagccagctgcatatcgtcggcggcggctgccagaacgcgctgcttaaccagctgtgcgccgatgcctgcggcctgccggtagtggccggccccattgaagcctccacgcttggcaatatcggcatccagctgatgacgctggatgaactgcacaacgtcgatgaattccgtcaggtggtaggcgacaacgcgtcgctcaccacgttcaccccacattcagatagcgaaattgcccgcttcgtcgcgcaatttcagccacaacctacaaaggagctttgcgcatgaccactcaacttgaacaagcctgggaaattgctaagcagcgctatgccgccatcggcgttgatgccgaagaagctctgcgtcagctggaccgcctgccggtatcaatgcactgctggcagggcgatgacgtggcgggctttgaaaacccggaaggcagcttaaccggcggcattcaggccaccggcaactatcccggcaaagcgcgtaatgcccaggagctacgcgccgatctcgaacaggcactaagcctgataccggggccgaagcgccttaatctgcacgcgatttatctcgaatccaccacgccggtagcgcgtaatgaaattaagccggaacactttaagcactgggtggaatgggccaaacgccagcagttggggctcgattttaacccttcctgcttctcacatccgctaagcgccgacggctttacgctgtcgcacgccaatccggagattcgtcagttctggatcgatcactgcaaagccagccgccgcatatccgcttatttcggcgagcagcttgggacgccatcggtaatgaatatttgggtgccggacggcatgaaagatattaccgtcgaccgcttcgccccgcgccagcggctgctgaacgcgctggatgaggtcatcagtgaaaaactcgatccggcgcaccatatcgacgccgttgagagcaaactgttcggtatcggcgccgaaagctataccgttggctccaatgaattctacatgggctacgccgccagccgtcaaaccgcattgtgcctggatgccggccacttccatccgacggaagtcatctccgacaaaatctccgccgccatgctctatatcccgcgcctgctcctgcacgtcagccgcccggtacgctgggacagcgatcacgtggtgctgctggatgacgaaacccaggccatcgccagcgaaattatccgccacaacctgttcgaccgcgtgcatatcggcctcgacttctttgatgcctccatcaaccgcatcgcggcgtgggttatcggtacccgcaatatgaaaaaagccctgctgcgcgcgctgctggagccgacggcgctgctgcgccagctggaaaacgacggtgattacaccgcccgcctggcgctgctcgaagagcagaaatcgctgccgtggcaggccatctgggaaatgtactgccagcgtcacgatacgccgtcaggcagccagtggctggaaaacgtgcggacctatgaaaaagacgtgctgagccagcgcggctaatgcctgacttccccggattgcgccatatggggcttattcggggagtcacacctattgcgaatcaacaggaaagacaagactatgcacaacatcatcaattcatggttcgttcagggcatgatcaaagccacctccgacgcctggcttaaaggctgggacgaacgtaacggcggcaatctgacgctgcgcctggatgaagcggatatcgcgccattcaaagccgattttcacccccagccgcgctatatcgccttaagccagccgatgccggaactggctaatcaaccgtttatcgtcaccggttccggtaaattcttccgtaacgtgcagctcgatcccgccgccaatctcggggtggtgaaagtggacaacgacggcgcgggctacttcatcctgtgggggctgacggaagaagccgtgccgacgtcggaactaccggcgcatttcctgtcgcactgcgagcgcatcaaagccaccggcggcaaagaccgcgtgatcatgcactgccatgccaccaacctgattgccctgacctacgtgctggagaacaacagcgatctgttcacccgcaagctatgggaaggcagcaccgaatgcctggtggtgttcccggacggcgttggcattctgccgtggatggtgccgggtaccgacgagattggccaggcgaccgccggcgaaatgcagaaacattctctggtgctgtggccattccacggcgtcttcggtagcggcccgacgctggatgaaactttcggcctgatcgataccgccgagaagtccgctgaggtattggtgaaagtctattcgatgggcggcatgaaacagacgataagccgcgaagagttgattgcgttaggccaacgctttggcgtcacgccgctggccagcgcgctggcgctctaagaaagcgagagccctttaaggagaataatcatgagctttatgttggcactgccgaaaatcagcctgcatggcgcgggcgcgatcggcgatatggtgaacctggtggcggacaagcaatggggaaaagcgctgattgtcaccgacggccatctggtggaaatgggcctgctcgatagcctgtttcaggcgctggaagcgcatcaactgtcttatcatctgttcgataacgtctttccgaacccaaccgaagcgctggttcagcaaggtatcgccgcattccgtgcggcgcagtgcgactatattatcgccttcggcggcggcagcccgatcgataccgctaaggcggtgaaaatcctcagcgctaacccagcgccgtcgacggcctattccggcgtgggcaaagtgaaaaatgccggcgtgccgctggtggcaattaacaccaccgccggaaccgccgccgaaatgaccagcaacgcggtgattatcgatagcgaacgtcaggtgaaagaggtcatcatcgacccgaacatcatcccggatattgccgtcgacgatgccagcgtcatgctggatattccgccgtcggttaccgccgcgaccggtatggatgcgttaacccacgctatcgaggcgtttgtctccgttggcgcccatccgctgaccgacgccaacgcgctggaagcgattcgcttaattcaccagtggctgccgctggccgtcgatgacgggcacaatctgcaggcccgcgagcagatggcatacggccagtatctggcagggatggcgttcaacagcgcaggtcttggtctggtacacgcgctggcgcatcagccgggcgcaacccacaatttgccgcacggcgtttgtaatgccatcctgctaccgattatcgaaaactttaaccgcccgaacgcggtggcgcgttttgcccgcatcgcccaggcgatgggcgtcgatacgcgcggcatgagcgatgaaaccgccagcatggcggcgattaacgcgattcgcgcgttgagcaaacgagtcggtattcctgaaggttttagccagcttggcgtgagtaaggctgatatcgaaggctggctggataaagcgctggccgacccctgcgcgccctgtaacccgcgcagcgccagccgcgacgaggtacgcgagctgtacctggaggcgttatgatccgcaaagcattcgtgatgcaggtcaatcccgacgcccacgaggagtatcggcgccgtcataatcccatctggccggaactggaagcgacgctgaaagcgcatggcgcgcaccactatgcaatctacctcgacaaacagcgccatctgctattcgccacggtggaaattgaatcggaagcccgctggaatgcggtggcggaaaccgaggtctgccaacgctggtggcgctatatgcgcgaggtgatgccgacgaatccggataacagcccgttgagcgctgaactgagtgaagtgttttaccttgcgtaataaagaaaacgcctgagcaatcaggcgtttttgctaccagagggattaggcatttttgcgcacaaagaaaccgtagcagcaggcgcccataaacagcagtatcccaccgagaataaatacgttggtaaagtgcccggtagcatcaagaataatgccggtgataatcggcgccagcgccgcgccgagaaagccgccaaagttctggatagcacccaatgaggcgacctgttctttcggcgccatatcggtcgctaacgtccagatcacgccggaaggcatttgtgaacagaagtagcccagcgtcagcagggcgatcgcaacgccgctattatcaacaaacggaatcggcatcacgaaacaggccgccagcgcggcacccgccacaatcggcactttacgcgcggtaacggcgttcatccctttacgcaccagtctgtcagaaagcatcccgccacacagcacgccgataataccggcaaagaaaggaatcgaggcgataaaaccggtctgcttgaggctaaagcccagcgaggtttccagatatcccggcagccatgtcagataaacccaaatggtaaacatgatgcagaagttaccggcaatcatgaaccacgtggttttccggcgaaacagttcgccccagctgaccttcggctgctcaccttcgggacgcatgactttgccggtgtttatcagcatcgcctcgcgcgcgtccgggtcgcgataaaatttaagccacgccagcaacaatggcagtccgagcaggccgacaaccatgaacatgccgcgccagccgatccataacagcaaaatagtcagcaccggcggcgctatcgcattggcgatttgcgaaccggtattgataatcgatgtcggcagcccgcgctctttctccgagaaccagctctgggtgatcttgataccggaagtgaagaacggtgactccgccacgcccagcagcatgcgcaaaccatagaagaagctataggtattcacaaaacccattaagaacgttaccgctgaccacaatcccagcgcgccgctgaacattttcttcgcgccgaaacggtctaccagccagccggcgggtaaattcgccagcgcatagggccagagaaacgctgacaataacagccccatctcagtaccagagaagccaaactccctggcgatggtggtgttcgcgatgctcaggttggcgcgatcgaggtaattgaccaccgcggccagcagcaggattaaaataatgccccaacgtcgacgcgagagtttcggcgccgcaatcgcttcagccgccgtttgatttagcgaactcataaaccctcctccagcaaggcgcgatcgattttcatcaccgctttacggatatgttgccgctcgccatcgcgcggatggcagcagggacgatggatgtcctggggaaagaaaatagcgaacatgccgggcttcagggttatctgcgtctcctcttcttcaacctgccagaacaggatgtcctgctgcggcgtccgatcctcggtaacgcgaggacagccgctttctgcgcggctgacacccatccgctcctcgccggaaatcagatactgaatatcaataaactgcttatgcgactccggtcgcgcctgcgcgaaaggcacgctctccatctcctgcagcaggcagaaaagtttcccggggatcaggtcgattttccccggcgcgaagcgctggaaatcctggctggcgataaacgccagcgcctggcggatcgccggatgaaacgcggcctgtcgcgcaggccacgcctgcagactcgatacgatcataatgatccctcccttagccggcgatccgctgctgccacagttcagtcccggcgctgatctggtcgaggatcaccgtcagcccccagaatttgctcagcacatcgtctttattaacccggcaggcgatactgtcgaaggtcccgaggcgctgatggtaaattttggcgtttttcgggtagcccagcgtttcggttaccgcgcccagcgacagaaatatcgccagttcatcggccagcgcccgctgatttttgccttcccgccacagccagctatacagttcgggatggaagttggtgaacacgccgctgaaaccttcggcgcccgccagcatcgccggccaggcgatcgcagcattggcgttgatgacctttagcggggttccctgcgacagacgcacgcggcgctcaacggtaggcagatcgcagctcacatctttcagcaccacgaaacgaccgctgttggcgcaccaggcgaactcgtcgtcgctaagcaggcggcgatacggcgccgggcactcatacagccccagcggcatggaagaaggtaaagccgccaacagcgattgcagggtagcgaaaaagacttcactgccctcattacgcggatcaagatgattagtgaccaacaccagcgcatcaatgccggtctgcgccattgccagcaactcctctttttgcgccgccagatcatcgctgatatggcccgaggcaatgactggaatgcgccccgccacgcgttgcaccacgaaacgcgccagctcgacacgctcctgtaagttgagatattgcatttcgctggactggcagacggcaaaaagcgcatccacgccttttgccagataccagtcgatcagcttcgccagcgccggataatcaatctggtcgtcagcggtaaaaggggtcagcatgacgggtacaacaccgttaatcgttttcatcttatttttcctggattagagggtacggagtcgggcatttgcctgcgcaaagtcaggcatgttggaagccccctccagctcgacggccagagaggcgaaagcagaggcccaggtcgcagcctgaaccagggtgttgccggcagccagcgaggcggcgagcgcgccattaaacgcatcgccagcgccggtggtatcgacggtgaccgccggaaaggcgcgaatttgactaaactggcgattatccagcagcagcgccccgcgcgatcccatggtaatcagcactttctttgcgcctaattcagcgatgcgcagcgcggcttctttggcagtatcaacatcgtgaatgtcgataccggataataatgaagcctcggtttcattcggtgtaatcacatcgatataaggaatgcttttgataatttccgccgagtatggcgccggattgagaatgactgtcttaccgagttctctggctttttttattagcgaatgagtggcatcaaaattattctcaagctgaacaagtaaaacgtcggaggcgctaagttcaggaataatcgcctcaatctcattatgagttattgtagtattggcgccggagtaaatagcaatcatattttcgccattttcctgcgaaacataaataatggcattgccggtaggttcgctctcagattgataaagcgtataggagtgtatttctgaacgagtgagatgatcggccgccaggtggctaaactgatccttgcccaccttagcgacaaaatggacctgcgcgccggctttactggccgccgtcgcctgattcgcccccttgccaccgggcccaaggctgctggcgagcgccagtagcgattccccgccgcgcggaaaacgctccactcgggccacgatatccacattaaatgagccgaatacacacactttgccgttcatcgattttcctttctgctgaccgctcgccgtaggtttccgatggttaatcggctgcagcagcacgccgaaactatcaccggtttcagaaataagttcagcctttaaattgtgccgggaaataatcgctccgccataacaacggtgcaccaaccccatttctgcaagaatatttaaatcactgcgaatggtttcttttgaaacactaaaataagcagcaaaataattaacaaaaccacgctcatgatcgtttaaatatttcaggatatgctttctacgttcttctaaaaacataataggccccaatgtcacgaattaagtatacgaaccccttccggcaggaagagtgacatcaatcccatgttttcaggcaaaacggaaggaaacaaaaatggaaaaacaataaagaaaatgagtgaataaataattcactcattcattaatgggaaatgaaataatcttctgcgcatcagaataaaatgcgcagattatgactaattttgctctgccaccagcagcgcctgggtatccggctccagcgcctgaaagagatgttcccgatcggccgggtagcagatgtaatccccttcccccagctcttctggcgcttcggtgaggccaacgcgcgcgcgcccctgagtgataataatatgttcgaccgacccgggcgggtgcgggtgcgagatccgatcggcgccgggctgcgtcaacagcagatagatatcgcgacgcgcgccgggagggcaagccgccagcaaaatggcctgatagttggcctgttcagcaaccactttggtgccttcgccgcggcgaatcacctgggtttggttggcctgcggttccagcaaacgggcgaagggaatatccaacgccacgcacagcgcccacaatgtttccaggctagggttgccattaccggattccagctgtgacagggtcgatttggctatcccggcgcggcgcgccacctccgccagtgagagtccggtgcgcgagcgctcgcgcgtcaggcttttagcaattacgctgatgggctgtgtcatacaccgctcctcgtattttatatcgaacgaatcgttcgtcttgaaaaaccattctgttgcgttcattataatggaaattcgttcgatatggctaaagcgtatgcgttacaaattttcctgtctcagtggggacaccattaaagcaatcgttctggtatgcctggcggtcggcgtggttggcatgtcttacggttcattagcgatggcctacggttttccgctgtgggtgccgtttgtcctttccattacggtgctggccggcgcctctgagtttatgtttatcggtattatcgccagcggcggtaaccctctcgccgccgcagcagcaggcttactggtgaacgcccgccacgttccttttggcgtcaccgtgcgcgatctggtcggcgcacgcgccgccagcctgctcggctgccacattatgaatgatgagagcgtggtgttcggcttgtcgcagaaaaccccggagcaacggaaagccgcctactggctctgcggcctgggtgtggcgctcatctggccgctcggtaccctgctgggcgccggggtcgggaaattgttacccgctccagaaacaatcggcctggatgcggtattcccggccatcctgctggcgttggtggtaccggcttttaaaaaacgtaccacactgattcgcgcctgcagcggcgcggttatttcgctggccgccgtgcccttcgcgccggttggattaccggttctgctctcattgtttggcttactggcgaggaaaaaataatgggcaatatgacgctgtttatcgccgggatcgcgattctgtcgatcggcacatatctgatgcgtttgggtggggcaaagcttggcagtcgtttagcgttttccgagcgctcgcaggcgctgctttctgatgccgcgacggtgttgctattttccgtggcgttggcgaccaccttttatgaaggcgagcatttttccggcatggcgcgggtactgggcgtcggttttgccgtgttccttgcctggcgcaagatgccgcttatcgtggtgattatcgccgcggcggtggtgacggcgttgctacgcctggcgggtataaactaaaaaagcgccctgaggcgctctttcgacggtagtgggttgctaacttatttgttcagttcagcggtcatatgcacgcggttaccgttaaacgcttcggtaatggtgtaagaagacgcgccggcagcctgcgcctgagcggcgattttcgcttccgcggcgtccatagtggaggcggtggcggtcacggattgcgcggcgaaagaaccgaaagaagcggccagagcgataacagcgacaaaagttttgatgcttttcatgatataaaccctttcatttagttgtttggataaggcaccgtgccttgatgtgataaataatagtcttcacatcccgtaactaaaagcggaaggatttgctgtcatctttcaaaaaaactgaccaacatttaaccggcaataagacgctgcggatgagtataaatcgtcgctctgcctggcctgcagaaccccaccagcgtcagattacaacgttcggcgacttccaccgccagcgtcgtcgccgcggagaccgcaaacagaatttccaccccacacatcgcggccttctgtaccatctcataactggcgcggctggagactaaggctgcgccctgctgccagccctctccttctgcactacggcgccccagcagtttatccagcgcaacgtgacggcctacatcttcatgcccgcccgccagttcgccgtcagggcgcacccacgcggcggcgtgcgtacagccggtcaggcggccgattggctgaacctcatttaactgtttgagcgcgcgatcgagatgagagagcgcaaaggtctggctaaagggcagcggctcaacgggcttaccgatatcatttagctgctcgacgccacatactccacagcctgtacgcccggcgagcgcccggcggcgctctttcaaccccataaaccggcggctggagagttcgatttgcacttctaccccgttacaggcctgcaccacgtccatcccgtagatctcttgtcggctttgtataatcccttcagatagggaaaaaccgacggcgaaatgttccaggtcacgtggcgtcgccatcatgacgacgtgcgagatgccgttataaaccagagcgacgggtacctcttctgctacctcgtctggctgaggatgttgcaaatcctcacgtttccagagggtaacctggcgataacctgtgacatctgtcacatttttgatttgttcaggaaggttcttattcactttcatttaaccgtattggaacaggcatacacacaatgtggtattctgtttttatatccctccaggaccgagggaaattaactcaattctgaacctttgcggccttcaccgcaaagtaaataactacatgtgacaatgtcgaaacaaggagcgaaccatgcaggtcagcagaaggcagttctttaagatctgcgctggcggtatggcaggcacgacggcagcagcgctgggctttgccccggctactgcgctcgcggaaacccggcagtacaaactgctgcgtactcgcgaaacccgcaacacctgtacgtactgttccgttggctgcgggctattgatgtatagcctcggcgacggtgcgaaaaacgccaaagcatccattttccatatcgaaggcgatccggatcatccggtaaaccgtggtgcgctctgcccgaaaggggccggtctggtggactttatccattctgaaagccgcctgaaattcccggaatatcgcgcgccaggttctgataaatggcagcaaatcagctgggacgaagcgttcgatcgcatcgcgaagctgatgaaagaagaccgtgacgccaactttatcgcccaaaacagcgccggcaccaccgttaaccgttggctgaccaccggtatgctgtgcgcctccgcttccagtaacgaaaccggctatttaacgcagaaattcacccgcgccctcgggatgctggcggtggataaccaggcgcgtgtctgacacggaccaacggtagcaagtcttgctccaacatttggtcgcggtgcgatgaccaaccactgggttgatattaaaaacgccaacctggtcgtagtgatgggcggtaacgccgcagaagcgcatccggtggggttccgctgggcgatggaagccaaaattcataacggcgccaagctcatcgttatcgatccgcgctttacgcgtacggcgtcggtggctgatttctataccccgattcgttccggtaccgacataaccttcctgtcgggcgtcatcctgtatctgctgaataacgaaaaattcaaccgtgaatacaccgaagcctataccaacgccagcctgatcgtgcgtgaggactacagctttgatgatggtctgttcagcggctacgatgccgaaaaacgccagtatgacaaaaccagctggaactatgaactggatgaaaacggcttcgccaaacgcgataccacgctgcagcatccacgctgcgtctggaatctgctaaaacagcacgtttcccgctatacgccggatgtggtcgaaaacatctgtggtacgccgaaggccgatttccttaaagtttgcgaatatattgcagaaaccagcgcgcacgataaaaccgcgtcgttcctgtatgccctaggctggacccagcactccatcggtgcgcagaacattcgcaccatggcgatgatccagttgctgcttggcaacatggggatggcaggcggcggcgtcaatgccctgcgcggtcactccaacatccagggtctgaccgacctcggcctgctctcaaccagcctgccgggatacatgtcgctgcctaatgaaaaacaggccgacctgcagacctacctgagcgccaacacgccaaaaccgctgttgaaagatcaggtgaactactggggcaactatccgaagttcttcgtctccatgatgaaagccttcttcggcgataaagctacggccgagaatagctggggctttgactggctgccgaagtgggataagagctacgacgtgctgcagtatttcgagatgatgaatcagggcaaagtgaacggctatatttgccagggctttaacccggtcgcctcgttcccgaacaaaaacaaggtagtggcttccctgtcgaagctgaagttccttgtgaccatcgacccgctcaacaccgaaacgtccaccttctggcaaaaccacggtgagtccaacgatgttgatccggcgaaaatccagaccgaagtgttccgcctgccgtccacctgcttcgccgaagaaaacggttctatcgtcaactccggccgctggctgcagtggcactggaaaggcgcggacgccccggggatcgccgtgaccgatggtgaaatcctcgccggtatcttcacccgcctgcgtaagatgtatgccgaagaaggcggcccaacgccggagccggtgctcaacatgacgtggaactactccacgccgcacgagccggcgtctgaagaagtggcgatggaaagcaacggtaaagcgctggcggatatcatcgatccggcaaccggcgcggtaatcgttaagaaagggcagcagttgagctccttcgcacagctacgcgacgacggcacgacttccagcggctgctggatcttcgccggtagctggacgccggaaggcaaccagatggcgcgccgcgataacgccgacccgtcaggcctcggcaatacgctgggctgggcctgggcatggccgctaaaccgccgcattctgtataaccgcgcctccgcggacccgcagggtaaaccgtgggatccgaagcgtcagttgctgaaatgggacggcgcgaaatggggcggagtggatattccggattacagcgccgccgcccctggcagcgacgtcggtccgtttatcatgcagcctgaagggatggggcgtctgttcgctatcgataagatggctgaagggccgttcccggaacactacgaaccgtttgaaacgccgctggggactaacccgctgcatccaaacgtggtctctaacccggccgctcgcgtctttaaaggcgatctcgagcagatgggcaaggccgagaagttcccgtacgtcggcaccacttaccgcctgaccgagcacttccactactggaccaaacacgcgctgcttaacgccatcgcgcagccggaacagtttgtggagatcggcgaaaaactggcgaataagctcggcattggccacggcgataccgtgaaggtctcctctaaccgcggctatatcaaagccaaggcggtggtgaccaagcgtattcgtacgctgcaggttcacggtaaagaggtggataccatcggtattcctattcactggggctacgaaggcgtggcgaaaaaaggctttatcgccaatacgctgacgccgtttgtcggcgatgccaacacgcagacgccggagtttaaggccttcctcgtgaacgtggaaaaggtgtaacggagacgacttatggcttatcaatcgcaagatattattcgtcgttccgcgactaacggtttcactcccgcgcctcaggcgcgggaccaccagcaggaagtggcgaagcttatcgacgttaccacctgtatcggctgtaaagcctgccaggtggcctgttccgaatggaacgatcttcgtgacgaagtgggtaacaacgttggggtgtatgacaacccggcggacctgaccgccaagtcatggacggtcatgcgcttctcggaagtggaacaaaacgacaagctggaatggcttattcgtaaagatggctgcatgcactgcgctgacccgggctgccttaaggcctgtccgtcagaaggcgcgatcattcagtacgctaacggcatcgtcgacttccagtctgagcagtgtatcggctgcggctactgcatcgcaggttgcccgttcgatgtaccgcgcctgaacccggaagacaaccgcgtctacaaatgtacgctgtgcgtagaccgcgtgactgtcggccaggagccggcctgcgtgaaaacctgcccgaccggcgctatccactttggttcgaaagaggatatgaaaacgctggccggcgagcgcgtcgcagagctgaaaacccgcggttatgacaaggcgggtctgtacgatccggctggcgttggcggcacccacgtgatgtacgtgctgcaccatgccgataaaccgaatctctaccacggtctgccagagaatccggaaatcagccaaacggtgaaattctggaaaggtatctggaaaccgctggcggcggtcggctttgctgcgaccttcgcagccagtatcttccactacgtcggcgtcggtccgaaccgcgcagatgaagaagaagacaacctgcatgaagagaaagacgaggtgcgcaaatgagaaaacgtgacaccatcgtgcgctacacggcgccggaacgcatcaaccactggataaccgccttctgctttattctggcggcggtaagcgggttaggctttttcttcccgtcgtttaactggctgatgcatattctcggtacgccgcagctggcgcgtattctccacccgttcgtcggggtggtgatgttcgcgtcgtttatcatcatgtttttccgttactggcatcacaacctaatcaatcgggatgatatcttttgggcgaagaatattcgtaagatcgtcgtcaacgaggaggtaggcgataccgggcgttataacttcggccagaaatgcgtattctgggcggcgattattttcctggtgctgctgctggtaagcggcgtgatcatctggcgtccgtactttgcgcctgcattctcaatcccggtgatccgattcgcgctgatgctgcattcttttgccgcagtcgcgttaattgtggttatcatggtgcatatctacgccgccctctgggtgaaaggcaccattaccgcgatggtggaaggctgggttaccaaaacgtgggcgaagaaacatcacccgcgctggtaccgtgaagtccgccagaaacaggaaaaatagactgcatgagtattcgcataatcccgcaagacgagctgggttcgagcgagaaacgcacggcggaagcaattccgccgctactgttccccagactgaagaatctttataaccgccgcgcggagcgtctgcgcgagctggccgccaacaacccgctgggcgattacctgcgctttgccgcgctgatcgctcatgcgcaggaagtggtgctgtacgaccatccgttgcagatggatctgactgcccgcattaaagaggccaacgatcagggcaagccgccgctggatattcacgtattaccgcgtgataaacactggcacaagctgctgcattcactgatcgccgagctgaaacctgagatgagcggcccggcgctgtcggttatcgagaacctggaaaaagcctccgggccggaactggaagagatggccagcgcgctgtttgcttccgatttcgcctcggtcagcagcgacaaagcgccgtttatctgggccgcgctgtcgctgtactgggcgcaaatggccagcctgatcccggggaaagcgcgcgccgaatacggcgagcatcgccagttctgcccggtttgcggctcgatgccggtctccagcatcgtgcaaatcggcaccactcaggggctgcgctatctgcactgcaacttgtgtgaaaccgaatggcatgtggtacgcgtaaaatgcagcaactgcgaacagagccgcgacctgcactactggtcgctggataacgagcaggcggcggtgaaagccgaaagctgcggcgactgcgggagctacctgaagattatgtatcaggagaaggacccgaaagtcgaagccgttgccgacgatttagcctcgctggtactcgatgctcgcatggaacaggaaggcttcgccagaagctcaattaacccgttcatgttccccggcgaaggggagtaagttctgcgctcctgtaacgggcgactcaggtcgctcgttatcattcatatagcgtgaccacgccggaaatgctctccttatcccgatcctgcttctccagatattgttcaacagaagaagcagatctttgctgagaaatacgcttttgcgagccgctttccacaatgcgatcgcggctttattcggtatatctttttcgcaaaaaccaggctataacactggatattaatccagtaaaagggacttaccatgacgttggaaaaaggtattgcttcgctggttgaggagtttattgctgcggggcggccatcagcacgagaacagagtattgatgaccggagaaacggctatctcgccagcgccgttctcgctggggcaacggaaacgcgtgtacaggttgaagacatcacgctcgatggcatgaccttgcgcgtcgtctcgccgccaaaaagcaacggcttgctacccaccattgtgtattaccacggcggctgttttgtgagcggcgactttgccacccatgacaaccaattgcgccagcttgcctggttcagtgggtgccgggtgatcgccgtgcagtaccgtctggcgccggagtacacttttccggcggcgcacgatgatgcggaacgaggcgccaacattatctatcggtatgcgcagcggcttggcgttgacgccgcgcgcatcacgctggccggcgacagcgccggcggccacctcgccctggtcacagcgctacgcctgaaagcggcgggagtatggcaacctgcgcagcttatcctgatttaccctatgctcgacgctaccgccagcatggcaagctacgccagcaacggcgaggattacatcattacccgggatacgctgcttagcggctacgaaatgtatttagcggccacacccgctacccatccggaagccagtccgctgtggcgcgaagattttaacgggctgccgccggttcatatcctgacggccgaatttgatcctttgcgcgatgagggagaagcgctgtaccggcggttaatagcacaagggatagaaagcacctgccagcgctatctgggcgtcattcacggtttctttcagttaggcgggataagcctcgcggcaaagcaggcgatgcgcgatatcgcctggcgtacgcaaacgccaggccaataataatgccggaggcgggttactcttcctcgttcccgccctcttcatacgaaccgaacggcttcgcgggcagtacgatataggttccctcaaaaacggcgcccagcttatcgttaccgaacagttcgacctgaagctgcacgcgagccttacgccctcgcgccaggcgatcgagatcgccgcttagcgagcccaaatcggccaccgcattcgggcgtccgctaataggcttgctgtaacggatatgcgcatcggcaaggataatcgtgccgccaaggtgccgctcgcgcagcattaaccagattagcccccagccggttaaggtagcgagcgaaaacaggctgccggcaaataacgtatggtgcggattctggttccccgcttcgggcatggtggtgataaatttttgcccggtatactgctgaatgcgcacccccatcttttcgctcagcggaatgtgctgataccaggcctgctgcagctggccgcaccagtcgccgcggtgcaggatatcatccagtgaagcaatgggtttaatcatcaagaagtggcgaatcggcgtcgttgtcggcgtggtgatttccccctggttcacaaagcccagcttagagaaaaactccatcgcatcttcacgggcgctacaggtcacccgcttcaccccttcctgacgggcgactgactcaagggtcatcgccataagggtgcctaaacctttatcctgaacggaaggatgaacggccataaaacggatcgaggcttcattctccgcattaatatacagccggccgacggcaaccagattgccctcttcatcgacgaccatctggtgatgcgccatggcatcccaggcgtcgcgttcggaccctttaggctgatgcagcggcttacgcaacatctcccagcggaactgataatagctttctaactcttcttctgtttgcggtacacgaaggtgatacatagctgtactctcttttgttacccgcagcctgcccggaagctgactcatacctgcaaccaaaaggtcacgggaccatcgtttaccagcgagacctgcatatccgcagcgaatctcccggtctgagtattcatttcttgttggcggcagcgctcaacaaagtattcatacagcgcttccgctctgtccggcgccgcgcctttggaaaaactcgggcgcatgccgcgctcggtatcggccgctagcgtaaactgcgaaactaccagcacgctgccgcccgcctgctggacattaagattcattttcccttcggcatcgctgaaaatgcgatagccgagcactcgttcacacagacgattggccttctgttcgtcatcgtctttctcgacgcccagcagcaccagcagtcccggaccgatttcacccgtcacttcaccctccacggtaacgcttgcacgggatacgcgttgaattaatgcaatcatggttgttctgtttcttcttttttgagtttgcggtattcaccgagagtgacagttatttcagcgccaagcaagacgatacaccaggtccagtaaacccagacaaacaaaatgggtactaccgcaatcacgccataaatcagctggtatgacggaaacatggtgatatataaagcaaaagcctttttaccggcttcaaaaagcagtgccgccaccagcgagccgattaccgcatcgcgattgcgtacctgggtggtgggcacaatgctataaagcatccagaacgccgcccacgataagattagcgggaatatacggagtacatcatcaatgacgctattgagatcgctggcccagcgtagtgagagaagataggaactgattgccagactggcgccagccaacagcggcccgagagtcaggatcatccaatagaccgcaaatgaatagatttttggccgcgtccgactgctgcgccagatggtgttcagcgcgctatcaatcgaatacatcagcagtaatgaggtgacaattaacccaaaggcgccgacggccgtcatcctgctggagttcgccacaaactgttcgatatatccctgaatgacatcgccggtcgccggaatgaagttggcaaagataaaatggcggatctgcacgctgacgtcagagaacatcggaaaggcggcaaacagggcaaaaaccacggcgatcagcggtaccagcgcaagtaaagacacgtaggccagattccccgccaacgtcgtcatgttgtcttcttcaattcgccgccacagcagcttaagccaggccaccagcggcctggtatggtatttggttttttgatgaacgctttttagcatagctgcttcgcaaagtagttggggatggtctccttatccgtgaccagaatactggtgatccccaactggttagccccagctatattatcggcgttatcgtcgaaaaagaccgcatcttgcggcgaaaatccttccgcctgcagcacgctttggtagatacgcgtttcgggtttgcgcatccccatctcttgcgaaagatacacatgatctgcggcagcacgcacttgtggatattcgcttggccagaaagtggtatgtaaacggttggtgttcgagagtacgaccacgcggtgcccctggtcgcgaagtttttgcataatgtcggtgacttctggacgcaaggcgacaaaaacggcctgccaaccgtgggcaaactgttcatagctcagcggcatgttcatttcatgacacattgcagcggcaaactcttcatcgctgatctccccgcgttcatgctggtggaaggcatcgcccataacaaagtcttgctttagcgtcgccagcgggatgcgggtcaaatcgctccacgttccgagcacccggttgaagtcaatgtcgacaatcacattacctaaatcaaagatatagagcatttttgtctccttccgcgccgttgaagattaactgtagcgggaaagaagaggtttgactatcgacggcgtgaaaagcgcccaaaaagaaaccccgccgttgtggcggggtttagcttgcagcaagaagggtaaattactcttctttcgcaccgcgcatagcgcgtttacggtcgttctcggtcaggtgacgtttacggatacggatagacgtcggagtaacttctaccagttcgtcgtcatcgatgaactccagagcctgctccagggtcatcttaaccggcggaaccagaaccgttgcttcgtcagtaccggacgcacgcatgttggtcagtttcttaccggtcaggcagtttaccgtcaggtcattagaacggctgtgaataccgataatctgaccttcgtaaacttcagcgccgtggccgaggaacagcttaccgcgatcctgcaggccgaacagtgcgaacgcaaccgctttaccctgaccgttagagatcagtacgccgttgttacgctggcccacttcgcccggacgaacatcgtcgtagtggctgaaggtggagtacagcagaccggtaccggaagtcatggtcatgaactctgaacggaagccgatcagaccacggcttgggatcacgtagtcgagacgtacgcggcctttaccgtctggattcatgtttttcaggtcgcctttacgctcgcccagcgcctgcatgacagacccctggtgctgctcttcgacgtccagcgttacgttttcgaacggctcttgtttacggccatcgatttcgcggaagataactttcggacgggaaaccgccatctcgaaaccttcacgacgcatgttttcaatcagaacggacaggtgcagttcgccacggccagaaacgcggaacgcatcggcgtcttcggtttcttcaacgcgcagcgcaacgttgtgcaccagctctttgttcagacggtccaggatctggcgagaggtaacgaacttaccttctttaccgcagaatggagaggtgttgacgttgaagaacatagatacggtcggctcatcaacagacagtgccggcagcgcttcgacgttctgcgggtcgcagatggtgtcggagatgttcagctcgcccagaccggtgatcgcgatgatgtcgccggcttcggctacgtcgctctcgatacgctcgagacccaggtgagtcagtactttaccgactttaccgttgcgggttttcccttcgctatcgatgatagtgatctgctggttcggcttcactttaccgcgcttgatgcgaccaatgccgattacgccaacgtagttgttgtagtcgagctgggagatttgcatctgcagcggaccgtcaaggtcaacgtccggcgccggtacacggtcaacaatcgcctggtacagcggggtcatgtcttcagccatgtcttcgtggtccagacccgcgataccgttcagcgcggaagcgtaaacgatcgggaagtccagctgttcgtcggtcgcgtcgaggttaacgaacaggtcgaatacctggtcgacaacccaatccggacgcgcgcccggacggtcaactttgttgatgaccacgatcggcttcagaccgtgagcaaacgcttttttggtaacaaagcgcgtctgcggcatcgggccgtcaaaggcatcaaccaccagcagcacagagtcaaccatggacataacacgctcaacttcacctccgaagtcggcgtgccctggggtatcaacgatgttgatacggtaatcattccatttgattgcagtgtttttagcgaggatggtaatcccacgctctttctccaaatcgttggagtccatcacacgttcttgtgcttcagtacgtgcgtcgaacgtaccggattgctgtagcagcttatcaaccagggtagttttaccatggtcgacgtgcgcgatgatggcgatattacgcagattttcgatcacaactttgcctcaggcattagaaatagcgcgttattgtacacgtattaagcgaaggactgaacaggatcacaaagatcctccgcaaacaagtattgcagagtttgtttgtgaccgctttcacggagcgataaaagggcaccgtaataaaaattgcaccaaaatggtgctcaacgttcacattgaagcactattttggtgcattatctccatcatggtgcagtccttttgcactatggtgcgcatgatacagcgttttaccgtacttttaaaagttggcacagatttcgctttatattttttaaggcaacaatgccacttttaagcagtaagaagttcgttaccacgacgacaatgaccaatccgggagagtttaagtatgtccgctgaacacgttttgacgatgctgaacgagcacgaagtgaagtttgtcgatctgcgcttcaccgataccaaaggtaaagaacagcacgtcacgattccttcccatcaggtaaatgccgaattctttgaagaaggcaaaatgtttgatggctcctcgattggcggttggaaaggtattaacgaatccgacatggtcctgatgccggatgccaccacggcgctgatcgacccgttctacgaagaaccgacgctgatcatccgctgcgatatcctggaaccaggcaccctgcagggttacgaccgcgacccgcgctctatcgccaagcgcgctgaagagtacctgcgcgccaccggcatcgccgacaccgtgctgttcgggccggaaccagaattcttcctgttcgacgacatccgctttggcgcatccatctctggttcccacgtggccattgacgatatcgaaggcgcatggaactcttctaccaaatacgaaggcggcaacaaaggccaccgtccgggcgtgaaaggcggctacttcccggttccgccggtagactcctctcaggatatccgttctaccatgtgtatgatcatggaagagatgggcctggttgttgaagctcaccaccacgaagtggcaactgcaggtcagaacgaaatcgccacccgcttcaacaccatgaccaaaaaagcggacgaaattcagatctacaaatatgttgtacacaacgtcgctcaccgtttcggtaaaaccgcgaccttcatgccaaaaccaatgtttggcgataacggttccggcatgcactgccacatgtccctgtccaagaacggcgtaaacctgttctccggcgacaaatacgcgggcctgtctgagcaagcgctgcactacatcggcggcgttatcaagcacgctaaagcgatcaacgccctggcgaacccgaccactaactcctacaagcgtctggtcccgggttacgaagcgccggttatgctggcttactccgcccgtaaccgctctgcttccatccgtattccggtagttgcctcgccgaaagcgcgtcgtatcgaagtgcgcttcccggacccggctgccaacccgtacctgtgcttcgccgcactgctgatggccggcctggacggtattaaaaacaaaatccatcctggcgatgcgatggacaaaaacctgtacgatctgccgccggaagaagcgaaagaaatcccgcaggttgcaggttctctggaagaagccctgcaggctctggacgcagaccgcgagttcctgaccgcaggcggcgtcttcactgacgaagctatcgatgcttacatcgccctgcgcattgaagaaaacgaccgcgtacgtatgactccgcacccggttgagttcgaactgtactacagcgtctgattttgctgtaaatccatggtgttcccgtgttgtggcacgggataccagggatgttttgttgccgtggaaactttcagcccatctcaggatgggcttttttctccagcaacacgctgatctctcgcgctttttaccaataaaaagctatactgcactaaaatagtgcaaccatttcaggagactgtcagatggcaacaggcacacagcccgatgctgggcagatcctcaactcgctgatccacagtatcttattagtcgatgacgacctcgcggtgcattacgctaacccggctgcccagcagttactggcgcaaagttcgcgtaaattattcggtacgccgctgccagaattgctgagctacttttcgttaaacattggcctgatgcaggaaagcctgcaggcgggtcagggcttcacggataatgaagtgacgctggtgattgacggccgctcgcacattctctccctcaccgctcagcgcctgcctgaaggctatatcctgcttgagatgtcgccgatggataatcagcgtcgtttgagccaggaacagctgcagcatgctcagcaggtggcggcgcgcgatttagtgcgcggtctggcgcatgaaattaaaaacccgctcggtggcctgcgcggcgcggcgcagctattgagtaaagcgctaccggatcccgcgctgatggaatatacccaggtgattattgaacaggccgacaggttacgtaacctggtcgatcgcctgctggggccgcagcatcccggtatgcatatcacggaaagcattcataaagtcgcggagcgcgtggtggcgctggtctccatggagttgccggataacgtcaaactgatccgcgattacgacccgagcctgccagagttggcccacgacccggaacaaatcgagcaagtgttgctgaatatcgtgcgcaacgcgctgcaggccctggggcccgaaggcggcgaaatcatcctgcgcacccgtaccgcctttcagctcacgctccacggcgtacgttaccgtctggcggcgcgtatcgacgtggaagataatggtcccggtatcccaccccatctgcaggatacgctgttttaccccatggtcagcggccgcgaaggcggtaccggtcttggcctttctatcgcccgcagtcttatcgatcagcactccggcaaaattgaatttaccagttggcctggccataccgagttctcggtatacctgcctattcggaaatagaggtgtttatgcaacgagggatagcctgggtagtcgatgacgatagctccatccgttgggtgcttgaacgcgcactcaccggagcgggtctaagctgtaccacatttgagagcggcaatgaggtgcttgatgccctcaccaccaaaacgccggacgttttactctccgacattcgcatgcctgggatggacggtctggcgctgttaaagcagattaaacaacgccatccgatgcttccggtcatcattatgaccgcgcactcggatctcgatgccgccgtcagcgcctatcagcagggcgcctttgattacctgccgaaaccttttgatattgatgaggcggtggcgctggttgaccgtgcgattagtcattatcaggagcagcagcagccgcgtaatacgccggtcagcagcccgacggccgatattattggcgaagcgccggcgatgcaggatgtgtttcgcatcattggccgcctgtcacgctcctcaatcagcgtactgatcaacggcgaatcaggtaccggtaaagagctggtcgcccacgcgctgcatcgccacagtccacgcgccaaatcgccgtttatcgcccttaacatggcggccattccgaaagatttgattgaatcggaactgttcggccatgaaaaaggggcttttaccggcgccaataccgtccgtcaggggcgttttgagcaggccgatggcggtacgctgttccttgatgaaattggcgatatgccgctggatgttcagacgcgactgctgcgcgtgctggctgacggccaattttatcgcgttggcggctatgcgccggtgaaagtcgatgtgcggattattgccgcgacccaccagaaccttgagctacgcgtgcaggaaggaaaattccgtgaagatttgttccatcgcctgaacgtgattcgcgtgcatttgccgccgctgcgcgaacgccgggaagatattccgcgcctggcgcgccacttcctgcagattgccgcccgcgaactgggcgtcgaagccaagcagttgcatccggaaacggaagcggcgctgacgcgactggcctggcccggtaacgtgcgacagctggagaacacctgtcgctggctaacggtgatggcagcaggccaggaggtattgacccaggatctgccgtccgagctgttcgaaacgtcgattcccgatagcccaacgcagatccaaccggatagctgggcgacgctgctggggcaatgggctgaccgtgccctgcgttccggtcatcaaaacctgctatcagaagcgcagccggagatggagcgtgcattgctcaccaccgcgctacgtcatacgcaagggcataagcaggaagccgctcgtctgctgggctgggggcgaaatacgttaacgcggaagctaaaagagctgggaatggaataacaccggtcttagcggcgaaatgaacacccggtgagttggctcaccgggattcgcttaaataacgcgagagaactgctgcaggcgcgctttctgccgcaaataggcatcgaagcacatacagatgttacgaatcaacagacggccttttgccgtgacctgtattcctttttcatccacatccaccagcccatctttcgccagcggtgccagcaatttcatatcttcggcaaagtaatcgttgaagataagatcccactgcgcttcaaccgccgcgaactcaagacggaagttgcaaatcagggccttaataacatcccggcggatacaatcatcgcgggtcaacgcaataccccgccacagcgctgtgccgctttcatcaacctgctgataatactgtttcagctctttctggttctgcgcgtagcagtcgccaatcatactgatcgccgacacacccattccgagcaggtcggtatcgccctgagtggtgtacccctggaagttgcggtgcagcacgccttcgcgctgggcaatcgccagttcatcgtccgggcgggcaaagtggtccatgccgataaactgatagccagcgtcggtaagcgaagcgatggtttcctgcaggatatccagcttctgctctgcgctcggtaaatccgcgtctttaattttgcgctgcgcagcgaatagcgtaggcagatgcgcgtagttaaatacgctcagacggtccggattcagttcagcgactttctgcagcgtgaaggcaaagctttccggcgtttgcttcggcagaccgtaaatcaaatcgatgttggtcgatgtgaagccaatctcacgtgcatgacgcagcagcgcaaagatgaattcctcatcttgttcacggttcaccaggcgctgcacttctttattgaaatcctgcacccccatgctcaaacggttgaaccctgcagatcgtaaatgatccagtacatccagttcgatttcacgcggatcgacttcgatggagatttccgcatcggcgttaaagctgaagtgcccgcgcagcagattcatcaagcggctgatttgcgctttgttgagataggtcggcgtaccgccgccccagtgcagttgactaacctggcggccggcaaaaagcggcgcgcggtgaataatttcctgctcaaggacatcaagatactggtcagccttatgctgttggcgggtgacaatcttattacagccgcaaaaatagcagagcttatggcagaacgggatatggacgtacagcgacagcggccgctgcgggtagcggtccacggcggcggcaaaatcagcagcgccgaacgccggagaaaactccagcgcggtgggatacgaggtatatcgcggcccggaatagttatatttctggataagggccagatcccagtcgattaactgctcagacatgctcactccttccgatgatgccgccgacgggtacgccgtgccggcccaaccgcacctcgggtcatgagccggttgcgcagccatttttgacgccgcgacaaccgtcttagtttaacgaataaccacagcagataacatataaccagaagggttataagcaggaccgggaatccgatgggatgcaaacgttagtttccacccttcagcagacgcatcatatcttcctgacgctcttcttcttcctcgtcctcgtcgtcgtcataggagaggccaagctgctgcatcagcgcgtcaatacgatccagtttggcatcgacccaagcctgctcttcagcattcagggtaccgccctcttccagacgttccagcagcgcgtccaggcgctcatcattctccagcaaatccagctcagcctgcggtgaaagcataggtttctcgctcttcggtttgtgctgcttaacggccggggtgctttctgtcacgcccagcgggatcggttttttgctgccaatgcgtgggtcctgctgctggctgcggcctttgcctgctgaagcagcatcgccgccgctggtgcggctgcctgcggcatggccgcggtgttttttctgacgtttacggtcgcgtgcttcctggttcaactcttcacgcgacttaccacgtgctttaccgcgcgatgcggatgccggttttttcatgatgtgtgatcttcagacagttttcttcagtatagaattgaggcggaatctagcagaaagcaagcaaagaaaaaaggcgacagattaatctgtcgcctttttccgcactcacaacccttaacgggtttccactttccatgtcagctatcgacttaccctgtctttcccttagcttccaacggtccttgttctatccctttcccttttaaaacgtctccagacgtttgtcatcctgacaatcccggtcttcgcctcctggcgctcctgacccctcgtcctgagtcgtaatcctccggcatcctcgcctttgcccactactttaccgttttgccggaaatcgacaaccacctgtaggatgaaaagcctgcttaagggaatagagtttcctgtaacagtatgatttaacgataatctatgaatttgacgtcaggtttttctcacaaatttcgtatagtccttatggacaatgtctcacaaagctcatggtttttacttacaacgccgacgtgcggtaaaaacagcctttttctgcctttcaggtataatccccgccatagcctgattttacggagacgacagtcttgaccaactggaattatcaacagacgcattttgtcacgagcgcgcctgatatccgccatcttccatccgataccggaatcgaagtggcattcgctggccgctcaaatgcgggcaaatccagcgcccttaatacgctgactaatcagaaaagcctggcacgtacgtcaaaaacgccgggtcgtacccagcttatcaacctgtttgaggttgcggaaggtaaacgcctggtcgacttgccggggtatggctacgcgcaggtgccggaagagatgaaaatcaaatggcagaaggcgctgggtgagtatcttgagaaacgtctgtgcctgaaaggcctggtggtattgatggatatccgtcatccgctgaaagatctcgatcagcagatgatcgaatgggcggtagaaagcgatatacaggtgctggtcctgctaaccaaagccgataagctcgccagcggcgcgcgtaaagcgcaggtcaatatggtgcgtgaagcggtactggccttcaatggcgatatccaggttgagcctttctcttcgctgaaaaaatctggcgtggataagttgcgtcagaagctggatagctggtttaacgacatcccgccgcaagaagccgccgaagacgcagagtaacccccgctttttccggataatggcgcccagcgccctatccggacgttcattttacgcggttgtcagcgcgtaaaacttttctttcgcgcaataaaaaacgccccggtcataaatgaccggggcggctaaaatattcagccaaatccgattacgtgaagtaaaaggtctgaaagatagaacatcttacctctgtaccctacgcgaataactttactcttctttcggttatggataaagcactttttgtagttttttttcactatttacataacaaattcaaatgaccatcacaaaaatctataagttatgttgctaacttacaaaaaagagccttacagattgcccacttagtgcgcttgatcccagttttcaccgctaccgacttccaccaataacggcaccgccagcgtggtgctgttttccatcagctcatgcaccttcttcgatacgctatccagatcgtctttgtgcacttcaaacaccagttcatcgtgcacctgcatgatcatccgcacgcgcggtttttcgctcagcagccagtcatcaacggcaatcattgcccgcttaataatatccgccgccgttccctgcatcggtgcgttgatcgccgcacgttccgcgcccgcgcggcgggcgccattgctgggatttgatatccggcagatacagacgacgcccttccagcgtttcaacatagccctgctcttcgccctgcgcgcgggtacgttccatgtagtcccagtacgcccggatagcgctcgaaatagagatccatgtacttctgcgcttctttacgcgggatattcagctgacgcgccagaccaaatgcgctcataccgtaaatcaggccgaagttaatcgccttcgcgctacggcgctgttcattactgacgctttctaacggtaagccaaatacctctgccgcggtggcgcggtgaatatccttaccttccgcaaacgccttcagcagcccctcatcgcgcgacaggtgcgccatgatgcgcagctcaatctgcgaatagtcggcagacacaatcagatagtcctgaggcgcaataaacgcctgacgaatacgacgaccttcgtcattacgtaccggaatattctgcaggttaggatcggtcgaagagagacgcccggtcgccgtcaccgcctgatgatacgaagtatgaacacgaccggttttcgggttaatcatcagcggcagcttatcggtataggtcgatttaagcttcgccagcccacgatactcgaggatcaccttcggcagcgggtaatccagcgccagttcctccagcacctcttcagaagtcgacggcgcaccgccaggcgttttcttcagcggcttgatgccctgcttttcaaacaggatagtttgcaactgtttggtagaagagaggttgaactcctcaccggcaatttcatgggcgcgttgttccagttcaaccagacgcttagcgatctcctgcgaatgcgcgtgaagcaccgccggatcgattttcacgccgttgcgctcaacccgcgacagcaccggcaccagcggcatctcgatatttttaaagatattcagcggaccttcatgctgctgcagttgcggccacatcttcagatgcagttgcagcgtcacgtcagcatcctccgcggcgtaacgcccggcctcttccagcgcgatctgattaaaggtgagctgatttttccccttaccggcaatctcttcaaaggtgatggttttgtgtttcaaccagcgatcggacaggctatccatatcatgtcgacccgcgacgctatcgagggtgtaggattccagcatggcgtcgaaggcaataccacgcagttcaatgtcatagttggccaggatgccgcgatcgtacttcaggttttgccctacttttagcaccttgtcatcttccagcagcggcttgagcagctccagcacgcgttcacgtgggatctggtccggcgcgtcgagataatcatgggccaccggcacataagccgcgacgccaggctcaatcgcgaatgacagacccaccatattggcggaaatgttatcgaggctatccgtttcggtatcaaaagcgaatagcggcgctttcttcaatctggcaatccattcgaccagcgtcgcttcatccaggattgtcacataatgctcagaagagagcgtcgcggcgatctcttcttccataattaccgcggcttcagctggtttcgccgctggtttagcgcctttcccctgtagccatttgccggattcgacatcggtgatccaacgtttgaattcatattgcttaaacaacgccagcagttcatctgccgccggctgcgcaactaacagctcttcgcaacccagatccagttcaacatcggtttttatcgtcgcgagttgataagagaggtaggccacctctttgttctgctccagcttcgccgccatcgttttcgcgccgcggaaggtcagcccggcgattttttccggttctgcatagagcgtatccagaccacccaaaccctgcagtagcgcctgcgccgttttttccccaacgcccgggacgccaggtatgttatccgaggagtcgcccatcagcgcgaggaaatcaataatcagttccggcggtacgccgtacttattcacgacctcttccgggccgaggatagtgttggtcatggtgttgattaaggtaatgcccggcgtcaccagttgcgccatatctttatcaccggtgctgatcagtaccgggcggcccactttttccgcctcgcgggccagcgtgccgataacgtcatccgcttcaacgccaggcaccgccatcagcggcagccccatcgccttcaccatcttgtgcagcggttcaatctgcgcacgtagatcgtccggcatcggcggacgatgtgatttgtaatgctcaaacaattcgtcacggaaggttttccctttggcatcaaataccacgacggcatgcgtcggctgatactgcaggatcaggctacgcaacatattcagcacaccgtacatagcgccggtaggctccccggcgctattggttagcggtgggaaggcgtggtaagcccgatataggtaagaggagccgtcgacgaggatgagagggttttctgggatctgaaccataatttccgtgcctgtttatcagattatgggtaaaggatgccacagacgggcatgaaatcctgaatttttcccgcatttagccgaaaagattcatcgcagaggggaatcgctgcacaatattatctgtggataactttgtgtatagttttatcgcctcagcccaaaaagcctaagccatgtaacatgtcatcttataactcattatatatcaaagaattaaatcttcccccaaggctatatgcgattcatgatgactcaatgttccatgtggatataagattcgcgtttttttctgttctggtaagacccgttatttaccgcgttttctggtaaaatcagcctcttgcgcggcttaagaaggttctttgccggcctaactttctgaataaactaactatgtcgagattactcgctgcgataacgctcccgctgagtatcgcccttaccatcttagtcaccattatctgttccgtaccgattatcatcgccggactgattaaactgctggtacctatcccggcggtatggcgttctatttccgttttttgcaattttatgatgtattgctggtgcgaaggactggcgctgctgctgcatctcaacccatggttgaaatgggatattcaggggctggaagggctgaataaaaagaactggtatctgcttatcagcaaccatcacagctgggcggacatcgtggtgctctgcgttctgtttcgcaagcatatcccgatgaataaatacttcctcaagcagcagttggcctgggtaccgtttatcggcctggcctgctgggcgcttgatatgccttttatgcgccgctattcgcgcggctacttactgcgccacccggaacgtcgcggtaaagacgtcgaaacgactcgccgctcatgtgaaaaattccgctctcatccgacaaccattgtcaattttgttgaaggttcaaggtttaccgctgaaaagaagcgcgagacgcgctcgccttaccacaacctattgccgcctaaagctgcgggcattgcgatggcgttaaacgtcctcggcgcacagttcgataagctactgaacgttacgctgtgctatccggataataatgccaggccgttttacgatatgttaagcggccgcctgacgcgtatcgtggtacgtattaatctggtgccgattggcgaggaactacacggtgattacgtcaatgataaaaactttaagcgcggtttccagcgctggctgaatgggctttgggaagaaaaagatcgtcagctcactgacattatgcagggtaacgaaaagtcgtgactatagagtcgataaaaaaagccggtcagtgaccggcttttttttatttcttttcaaccagttgtttcacagtatctgcgtactgggaaacaaacgcgtccatattgctggtatccataccctgcgggttcagctggtatttaccattaacaaacatcgccggaacgccctgcagctgtaaatcggctgcggctttctcttgctgggcgaccagagacttcaccacaaagctgttccatgccgcgtcgtaatcttcacctttaacgcccgcatcaacgaagactttacggatgtcggcagtggactgcacggtttgggttttctgtaccgcttcaaacatcggcgcggttactttatcttcaacgcccagcgcgatcgccacagcccacgcctgggtcaggtctttacccaacgggcccaggaattcaacgtgatacttggtcattttggtgccttcaggcagtttctgacgtacattgtcggaaacgtgcagcacttcttcaaactgatagcagtgcgggcagtagaatgagaagaactcaaggacctgaggttcacctgcaaccggcttatcaagggtggtgtactgcttgccgtcggtgatctgggcagcggatgcactgaaagccagaatcataccagccagcgccagccaaatttttttcatgattatttctctcctgatatatcacattaatacattggcgttaactgaagagggggttcctgcagaaccttcacctgctcaagaaatgttgcagtctgcccgcgccaataatcttccccggttaaccatgggaaatttatagggaaagcaggatcgtcccaacgcctgagcagccacgccagataataaactaaacgcatggcgcgtaaaggttcgatgagagcgatttcgtccgtgttgaacggactgaattcttcataagcctcaatgatggtctccagctgcatgcgctgttcggctttatcgccattcagcagcatccagagatcctgtaccgccgggccgctgcgggcatcatctaaatcaacaaacagcggaccatcgcgccacaggatattgccggcgtggcagtcgccatgtagacgaagcgtatccgcacgcccgtgccactgcgccctgacggcatcgatgagtttatcagccgcccccaggaaatcagccttcaggccagatggaataagcgtcgcctgttcgaatacctgacgtggttccaacagatattcttgtacgccaatctccgggcgcgcattaaaacgctgcttacgaccggtctggtgcaggcggccaagatagcgcccgacccattctatttggtcaagattatccgcttcgaactggcggccaccgaggcttgggaagacggcaaagaagaatccttgatgttgatgtagcgtgctgtcgttaaataagagcggcgcggcaacgggcacttcatcttctacgagttgaagcgcaaactgatgttcttcgaggatctgttctgcagaccagcgttcaggacgatagaacttcaccacgtagcggcggcgatcttcgtcctgaaactggtaaacacggttctcatagctattaagcggggtcagaccggagtcgacccgcattcccagatcgaataatccatcaatgatggtatccgggtgaagcgtctgaaaagtaaaagccttatcgtgcatcctgacatccgataatcgtacgaatgcttcaggatatcatctcgtagccggtttcgcggcagcacttacaaccttttactctttaataacaccgcgcgcgcgtaacagtgcagttttaaaatcctcttcataatctttctgaatacccgggatgacagcctctttcgatgaatcacgcatcttcaggtgataaatcagaatatcatcagaaagatcggctagttcacctttgtaacctgcttcagccgccagtttctgcaagaattgcatcaggttcagttcaggttctttttgccaggctggctggagaagctcaattacttcattcaggcgtttacatttcatagtcatgctccttactcttgatagggacaagttaacagggtcaatcccacaatgaaagaggcgatattaatatgcaaagcgaggcaataaccggcgtcgtgctggcgggtggaagagctacgcgcatgggcggtgttgataagggattgcagttgctgaatggtcgtcctctctggcgtcacgttgcggattcattagagccgcaggtaggcagattagtgattagcgctaatcgcaatcttgagtattggcatactagcggatatgccgtttatcgcgatacccaagctgattttccaggcccactggccggaatgcttgccgttatgcagcaggtagatagcccatggtttgtattttgcccctgcgacacgccgttcatcccctcttttctggtcgagcgctttctacaacagaaagcttcagcgccggtggtttgggtacacgatggcgagcgcgatcatcccgccgttgcattagttcatcgtcaaatcattccggaactggagacttatctggctcatggagaacgccgggtgatggtctttatgcgtcaagtaggtgggcacccggtgaatttcagcgatgtgaaatcagcgttcatcaatgtaaatacgttggatgagttgcagcagatgcaggagtcatcatgatccccttactggcgatcgccgcatggagcggtaccgggaaaacaacgttattaaaacgccttatccctgaactctgcgctaaaggattgcggccggggctaataaagcatactcatcacaatatggatgtcgataaacctggcaaggatagttatgagttgcgcaaagctggcgcttcacaaactattgtcgccagtaagcagcgttgggcgctgatgacagaaaccccagatgaacccgaattagatcttcaatggctggtaagcagaatggatcctgacaaattggatttcgttttggtggagggttttaagcatgaacctgtgccgaagatcctgcttttccggcaaaatagcggacatcttgtagaagagctagtgattgatgaacatacgatcgccgtggccagcgatgtacccatcgtgacgtcacttccgctgttggatttaaataatattccacagatcgcgacgtttattgcgagttggttagagaggcaatagcggtgatataggtgggatttccccggaggcggtgctacgcaccttttccgggctacggggtctgtagccccggtaagcgcagcgccaccggggaagatggcggagtacctggccgcaaaacacaaaaacaaaaggcccggtcttccgactgagcctttcgtttacgttgctatgacagcggctttccccggaggcggtgctgcgcaccttttccgggctacggggtctgtagccccggtaagcgcagcgccaccgggggagatggcggcgcgtctggccgcaaaatacaaaaacaaaaggcccagtctttcgactgagcctttcgttttatttgatgcctggcagttccctactctcacatggggagaccccacactaccatcggcgctacggcgtttcacttctgagttcggcatggggtcaggtgggaccaccgcgctatcgccgccaggcaaattctgttttcaacacgtcctcaggacgcatcgagtaatctgtatcaggctgaaaatcatctcaaatcgccaaaacaccttcggcgttgtaaggttaagcctcacggttcattagtatcggttagctcaacgtatcgctacgcttacacacccgacctatcaacgtcatcgtctttaacgttccttcaggagacttaaagtctcagggagaactcatctcggggcaagtttcgtgcttagatgctttcagcacttatctcttccgcatttagctaccgggcaatgccattggcatgacaacccgaacaccagtgatgcgtccactccggtcctctcgtactaggagcagcccccctcaattctccagcgcccacggcagatagggaccgaactgtctcacgacgttctaaacccagctcgcgtaccactttaaatggcgaacagccatacccttgggacctacttcagccccaggatgtgatgagccgacatcgaggtgccaaacaccgccgtcgatatgaactcttgggcggtatcagcctgttatccccggagtaccttttatccgttgagcgatggcccttccattcagaaccaccggatcactatgacctgctttcgcacctgctcgcgccgtcacgctcgcagtcaagctagcttatgccattgcactaacctcctgatgtccgaccaggattagctaaccttcgtgctcctccgttactctttgggaggagaccgccccagtcaaactacccaccagacactgtccgcaaccccgattaggggccaacgttagaacatcaaacattaaagggtggtatttcaaggttggctccacgcagactggcgtccacgcttcaaagcctcccacctatcctacacatcaaggctcaatgttcagtgtcaagctatagtaaaggttcacggggtctttccgtcttgccgcgggtacactgcatcttcacagcgagttcaatttcactgagtctcgggtggagacagcctggccatcattacgccattcgtgcaggtcggaacttacccgacaaggaatttcgctaccttaggaccgttatagttacggccgccgtttaccggggcttcgatcaagagcttctccttacggataaccccatcaattaaccttccggcaccgggcaggcgtcacaccgtatacgtccactttcgtgtttgcacagtgctgtgtttttaataaacagttgcagccagctggtatcttcgactgatttcagctccacccgcaggggcttcacctacatatcagcgtgccttctcccgaagttacggcaccattttgcctagttccttcacccgagttctctcaagcgccttggtattctctacctgaccacctgtgtcggtttggggtacgattcaatgttacctgatgcttagaggcttttcctggaagcagggcatttgttacttcagcaccgtagtgcctcgtcatcacacctcagcgttaaaaggtaccggatttacctggaacctccgcctacatgcttaaaccgggacaaccgtcgcccggctaacatagccttctccgtccccccttcgcagtaacaccaagtacaggaatattaacctgtttcccatcgactacgcctttcggcctcgccttaggggtcgactcaccctgccccgattaacgttggacaggaacccttggtcttccggcgtgcgggcttttcacccgcattatcgttacttatgtcagcattcgcacttctgatacctccagcaaccctcacaggccaccttcgcaggcttacagaacgctcccctacccaacaacacatagtgtcgctgccgcagcttcggtgcacagtttagccccgttacatcttccgcgcaggccgactcgaccagtgagctattacgctttctttaaatgatggctgcttctaagccaacatcctggctgtctgtgccttcccacatcgtttcccacttaactgtgactttgggaccttagctggcggtctgggttgtttccctcttcacgacggacgttagcacccgccgtgtgtctcccgtgataacattcttcggtattcgtagtttgcatcgggttggtaagtcgggatgaccccctagccgaaacagtgctctacccccgaagatgaattcacgaggcgctacctaaatagctttcggggagaaccagctatctcccggtttgattggcctttcacccccagccacaagtcatccgctaatttttcaacattagtcggttcggtcctccagttagtgttacccaaccttcaacctgcccatggctagatcaccgggtttcgggtctataccctgcaacttaacgcccagttaagactcggtttccctgcggctcccctatacggttaaccttgctacagaatataagtcgctgacccattatacaaaaggtacgcagtcacacccaaggtgctcccactgcttgtacgtacacggtttcaggttctttttcactcccctcgccggggttcttttcgcctttccctcacggtactggttcactatcggtcagtcaggagtatttagccttggaggatggtccccccatattcagacaggataccacgtgtcccgccctactcttcgagttcacagcctgtgcattttggtgtacgggactatcaccctgtaccgtcggactttccagaccgttccactaacacacaagctgattcagactctgggctgctccccgttcgctcgccgctactgggggaatctcggttgatttcttttcctcggggtacttagatgtttcagttcccccggttcgcctcgttaacctatgtattcagttaacgatagtgcaacgaattgcactgggtttccccattcggacatcgccggctgtaacggttcatatcaccttaccgacgcttttcgcagattagcacgtccttcatcgcctctgactgccagggcatccaccgtgtacgcttagtcgcttaacctcacaacccgaagatgtttcgtaaaacacccacgtgttgcgaaaatttgagagactcgaacacacattaactgtgtgtcgtttcaattttcagcttgatccagatttttaaagagcaaatatctcaaacgtcacccgaagatgagttttgagatatatcggcacgcgtctttcactcacgaaccagcaagtggcgtcccctaggggattcgaacccctgttaccgccgtgaaagggcggtgtcctgggcctctagacgaaggggacactgaagtctcaatcgcaagacgccttgcttctctactttcatcagacaatctgtgtgagcactacaaaggcaggttctttaaggtaaggaggtgatccaaccgcaggttcccctacggttaccttgttacgacttcaccccagtcatgaatcacaaagtggtaagcgccctcccgaaggttaagctacctacttcttttgcaacccactcccatggtgtgacgggcggtgtgtacaaggcccgggaacgtattcaccgtagcattctgatctacgattactagcgattccgacttcatggagtcgagttgcagactccaatccggactacgacatactttatgaggtccgcttgctctcgcgaggtcgcttctctttgtatatgccattgtagcacgtgtgtagccctactcgtaagggccatgatgacttgacgtcatccccaccttcctccagtttatcactggcagtctcctttgagttcccggccggaccgctggcaacaaaggataagggttgcgctcgttgcgggacttaacccaacatttcacaacacgagctgacgacagccatgcagcacctgtctcagagttcccgaaggcaccaaagcatctctgctaagttctctggatgtcaagagtaggtaaggttcttcgcgttgcatcgaattaaaccacatgctccaccgcttgtgcgggcccccgtcaattcatttgagttttaaccttgcggccgtactccccaggcggtcgacttaacgcgttagctccggaagccacgcctcaagggcacaacctccaagtcgacatcgtttacggcgtggactaccagggtatctaatcctgtttgctccccacgctttcgcacctgagcgtcagtctttgtccagggggccgccttcgccaccggtattcctccagatctctacgcatttcaccgctacacctggaattctacccccctctacaagactctagcctgccagtttcgaatgcagttcccaggttgagcccggggatttcacatccgacttgacagaccgcctgcgtgcgctttacgcccagtaattccgattaacgcttgcaccctccgtattaccgcggctgctggcacggagttagccggtgcttcttctgcgagtaacgtcaatcgccaaggttattaaccttaacgccttcctcctcgctgaaagtactttacaacccgaaggccttcttcatacacgcggcatggctgcatcaggcttgcgcccattgtgcaatattccccactgctgcctcccgtaggagtctggaccgtgtctcagttccagtgtggctggtcatcctctcagaccagctagggatcgtcgcctaggtgagccattaccccacctactagctaatcccatctgggcacatctgatggcatgaggcccgaaggtcccccactttggtcttgcgacgttatgcggtattagctaccgtttccagtagttatccccctccatcaggcagtttcccagacattactcacccgtccgccgctcgtcacccgagagcaagctctctgtgctaccgctcgacttgcatgtgttaggcctgccgccagcgttcaatctgagccatgatcaaactcttcaatttaagtttgatgctcgtgaattaaacttcgtaatgaattacgtatgttcactcagagacttggtattcatttattcgtccgaggacgttaagaatccatgtcactttgagtgcccacacagattgtctgataaattgttaaagagcagttgcaacgcggctttcagctcaccgttgcgaggtcacgtatattacgttttcctcattcagagtcaagcgtttattttcacttttctctgtcggttttcagcgttgttatttaccgctgaaaccctgctgacccggcggcttgcttgccgttgttccgtgtcagtggaggcgcattatagggagttctgagacgttgacaagccctgttttcaaaaaacttttcaaccgtctcttttttcaccaaaggcggtgtcaaaaccgtaaaaaatcgcccttttgctgttttaaccaccgaaacaagccgccaggtggcatactgatgaagtagaaaagagaaaggaacggcatttatgtctataagcgcacagcagctggcggcacaaaaaaacatctcctgggtcatcgcggagaagatcgcccaaaaaattctcaccggcgaatatccgccagagagcattcttcctggtgaaatggaactgggcgaacagtttggcgtgagccggacggcagtacgagaagcggtaaaaacgctggcagctaaaggcatgctgcttccgcgcccgcgtatcggaactcgcgttctggcacgcagcagctggaactttctggataaagagctgcttgcctggtggctgacggaagataattttgccgaggtggttagccattttctggtgatgcgtagcagcctggagcctcaggcctgttttctggcggcgataaacggcacctccgagcagaaagcgcagctcaatacgctaatggaagaaatgatcgagctgaaaagacattttatccgcgaacgctggattgaagtcgatatggcctggcatgaacatatttatgcgatgagcggcaacccgttcctcacctctttcgcgtcgttattccattcggtatatcagacctatttcacctcgattacgcaaaatgaagtcgttaaactcgatctacaccaggctattgttgacgccattcaggaaagcgacggtccacgcgcgcagcttgcctgccagacattattgaacaccccaaaccacacaggtaaataaagaaggaaatggcatgaccgggaagaaagggctgagtatggccggactgccatggattgcggccatggctttctttatgcaggcgctggacgccactattcttaataccgcgcttcccgcgattgcgcatagcctcggtcactccccgctggcgatgcaatccgccattatcagctacaccctgacggtagcgatgctgattccggtgagcggctggttggccgatcgctttggcacccgcaaggtctttatcgttgccgttagcctgtttaccctgggctccctcgcctgcgcgctttccacttcgcttcccgaattggttgtcttccgcgtcatccaggggatcggcggcgcaatgatgatgccggttgcgcgcctggcgctgttacgcgcctatccgcgtagcgaactgctgccggtactcaacttcgttaccatgcccggactggtcggccccatcctcggccctgtactcggcggcgtgttagtcacctgggccagttggcactggattttcttgattaacatcccgattggcatcatcggcattctctacgcccgcaaatatatgccggacttcaccacgccccgccgtcgtttcgacaccagcggttttgtgctttttggtttaagcctggtgctgttctccagcggtattgagctctttggcgagaaaatcgtcgccagctggatagcgctggccgtcatcgccctgagcgtcgtgctcatgctggcctatattcggcatgctcgtcgccatcccactccgctgatttcgctctctctatttaagacccataccttctctgtcgggatcgccggtaacctggcgacacggttaggtaccggctgcgtgccgttcctgatgccgctgatgctacaagtcggtttcggctacccggccattatcgccggctgcatgattgcgccgacggccatcggctcgataatcgccaagtcgaccgtcacgcagatcctgcgctggtttggttatcgcaaaacgttggtgggagtcaccatctttattggtttgatgatcgcgcagtttgcgctgcagtcgccgggaatgccgctgtggctgctactactgccgctatttgtactggggatggcgatgtccacgcagttcacctcgatgaacaccattacgcttgctgatttaaccgatgacaatgccagtagcggcaacagcctgctcgcggtaacccagcagctgtcgattagccttggcgtagccatcagcgcggcggttctgcgtttttatgaagggtttgataacgccagtaccatcgaacaattccactatacctttatcacgatgggtgcgatcaccgtggtgtcagcgttgatgtttatgctgctcagagccaaagatggccgcaacctgataacggagcggcacaagcactaagctgaaccgcgaatcaccagctctggagtgagctgcacgcgctgctgtttttgcccgggatccgccatgcggtgaatcagcacatcgatagcgagctctcccagttcatctttaggttgatgaatggtggtgagcggcggggtcatatagcgcgccagttcaatatcgtcataccccaccagcgccatatcctgcggaatacgcaacccggactgatacagcgcctgatacgcgccgaccgccatcgcatcattaccgacaaagaccgcctgcggccgtggcgttaacgccagcagttgctgcatcgcagtaaaaccgccgccaaattcaaaatcgctggtaatgacataaccttcggcgacatccagcccggcgcgcgccatcgccgcatgatagccctccagccgcagtcgcgacggcgttttatccagcggcccggcaatgcaggcaatacgggtatgaccgcgatcgatcagatactgggtcgccatatcgccaccgagcaacgaattatcctgaatgagatcgctgtcgccgtcgaacggcgcccaatccatcatcaccgtcggcaccgacggataacgctgcatgatctcctgggaaggttgatgcgtttcggtgcacagcagcagcagaccatcgacgcgtttttgcatcagcgtttccagattgcgattcatccgctgctcatcgccttcggtattacatagcaccaggctgtagccgcgctcgaaacagctgcgttccacgccgcgcaccagctccgaatagaacgggttagtactggcggtgatcagcatgccgatggttcgcgtctgatttaacttgaggctgcgcgccagcgccgaaggcgcgtagttaagacttttgatcgccgcatcaactttggcggtaatcgcctcgctgacaaagcggtctttattaatgacgtgagaaacggtcgaggtggaaacgcccgcgacgcgggccacatccttcatggtagccaagcattacccctgttgacgcaagaattcgtcgatctctttgcgccacggcacagacggttgcgcccccttacgggtgacggcaatcgcggcggcggcatgggcaaaacggatggcgtctgacacttcacggccttccagcagcgcggtgacaaatgcgccattaaaagtgtcgccagcggcaatcgtatcgatggcctgaactttaaatcctggaacccggcggctttcgccctcgcagcttaaccaaacgccgcggctgccgagagtaatcatcaccgtaccaattcccttcgcatgaagcgcactggcggctttcgcggcatcgtcgtcgctctcaacgcgaataccggtcagcttttccgcttcggtttcattcggcgtaatgacatccaccagcgccaatagctcatccgaaagttcacgcgccggtgcgggattgagtaccaccgtcgtctgatgctgatgagcgattttcgcggcagccatcacgctctccagcggcgactccagctgcattaacaatgcctgcgcgttggcgatacgttctttctccgcctctacctgagaaaccgatagcgctgcattagcgccggcatgaataccgatgacattctcaccttccgcgttaacgaaaattaacgcgacgccggtagattcgccagcaacggcacgcaccggagccacgtcgatattatcgctctccagctggcggcggacgcgttcgccaatgtcgtcatcgccggtacaggcaatgaaggcaatatccgcgccgctacgcccggcagccaccgcctggttagcgcctttaccgccgaatgcgacctgatagtggtttccggtgacggtctcacctggagtagggaaggattcaaggttaagaatgtgatcggcattgatgctgccaaggacgacaagtttgcctgcggttttcatcatctttattcccgggaaagcgcgccaccggactccggtggcgcatgccctgcttttctttttatgttgtccctcgggccgttgccggcccgaatcgcattttactgcttaatgaccagtttcagctcaaccggatagctggcatccactttttcgcccttcagcactttatcagcggtttcgacgcctttaacgccgatctgctccggcaactgggcgatagtcgctgccagtttgccactatttactgctttttcgccatccggagtgccgtcaaatccaaccaccatcacatcagattttcctgcagtctgcagcgcacgcagcgcgcccagcgccatttcgtcgttctgcgcaaacaccgcctgcacgtcaggatgcgccgtcagcaggttctgcataacgttcagacctttagtacggtcgaagtcagcgggctggctggccagtacgttgaacttatgcgccgccacggcctgtttgaaaccttcgccgcgctcgcgcgccgcagaggtaccagcaataccttgcagctcaatcactttcgcgctttcgccgactttcttcgcgatatagtcgccggccattttaccgcccagcacgttatcggaagcaatatggctcaccacatcacctttagaagcctggcggtcaagggtaatgaccgggattttagcctggttcgccatcttcaccgcattgccgacagcatcggagtcggttgggttaatcagcagcagcttagcgccacgcaccgttaagtcctgtacgttcgccagctcttttgccgggttattctgagaatccagcaccaccaggttgtaacccagcttatcggcttctttctgcgcgccgtctttcagagaaacgaagaacgggttattcagggtagagataaccagtgcgatggtatctttcgccatcgcgtttgcgctaacggtcgcgcttagagcaacagcagagaccagggtcgccagttttttcatattcatagttaagatgtcctgtagagttctcagttactgctttttgttatctaccagtaccgccagcaaaatcaccaccgctttgacgatcatctggtaataggaagaaacgcctaaaaggttcagaccattattcaggaagccaaggatcagcgcgccaatcagcgtgccgacgatacgacctttaccaccggccaggctagtgccgccaagtacgaccgctgcgatcgcgtctaattcatagcccgtccccgccgtcggctgcgcagaggaaagacgcgccacttcgatgatcccggccagtgaagccaacattccgcataacgcatagacgatgattttcactctatttacgctgatgccggaaagccgcgtcgccgcttcattaccgcccagggcataaatataacgacccaggcgagtatggtgcagcatgtaccaggccgccaggaagacaatcgccataatccataccggcgtagggatccccagcgggcgtccgataccgaaccagccgaacagatcggcgttatcgctaaagccggtgttgatcgggctgccgttggtgtaaaccatcgtcacgccgcgcagcagcagcatcattaccaaagtggcgataaacgcctgcacacgccctttcgcgacaatcaccccggtcaccgcgccaatagctgcaccgagcgccagagcggcggcaacggccaccagcgcattcacttcgataccgacgatagacgccgcgacggcgccggtcaacgccaacagagaaccgacggacagatcgatccccgatgtcagaatgaccagcgtcatcccgaccgccatgatggcgttaacggaagtctgctgcagaatattgaacaggttattgacggtaaaaaagttggggctcatggtcgaaacgatcgcgatcagcaccagcagggcgatcagcgatttttgctccatcagccacgctttagtgaaatagcggcgaccagtaacagcctgggtagtcatcttttttactcctgattcacacggttaagcttgcccacagcggcagccatcaatacttcctgggtggcctgctcgcgtgtgaattcaccgccgagatgcccttcatgcatcacaatgatgcgatcgctcatgcccagcacttccggcatctccgaagagacgagaatgatgctcaggccatcggctttaaactggttaatcagttggtagatttctttcttcgccccaacgtcgacgccacgggtcggttcatcgaggatcagcactttcggccgggtcatcagcccgcgagcgatagcgactttttgctggttaccgccggaaagcaggccgattgcctgctccattgaaggcgtcttcacattaaacagccgaatgaaatcactgaccgcctgctgttcatctttatgcttaaggctgccgcccgcccggctgaagtagcgtagcgcggtcaatgacatgttttctttgaccgacattccgagcaccaggccatcacgcttacggtcttcggagatatagacaatgccgttcgccaggccatcctgcggcgaacgggtgacgacttcatggccatccagcgtcacggaaccgctgctacgcggcagcgcgccgtacagcactttcatcagttcagtacgcccggcgcccatcagcccggcgacgccgaggatttcgccctgacgcagggtaaacgtcacgttttccacaccggagccgcagagattatcgaccttcagacgtaccgcgcccggcgccttatcgagatgcggatattgatcttccagcttacggccaaccatcatctcgatcagtcgatcctcatccagcgaagccacttcacgctcggcaataaattgcccgtcgcgaaatacggtgacgtcatcgcagatttcgaagatctctttcatgcggtgggagatatagacgataccgcgcccctgcgacttcaattcgcggatgacgcggaacagcgattcggtctcggtatcggtcagggcatcggtaggctcatccataatgatgaccttcgattcgaagctcagcactttagcgatttccaccatttgctgatcgccaatcgacagatcgcccaccagcttctggctgttaaagcgtaaattcagcttcgccagcagcttgtccgcttcggcatacatctttttccagtcgattttgccaaagcggttaacgaactcgcggccgaggaagatgttctcggcaatcgttaattgcgggatcaggttgagttcctggtgaatgatgccgataccggcttcctgtgaggattttgggccgttaaaggtcgtttctttacctaaccacagcaaagaaccggcatcacgggtatagataccggtcagtaccttcatcattgtagatttaccggcgccattttcccctaccagcgccatcacccggccggcatagacattcagcgccgcgccggagagcgctttgacgccagggaacgctttatcgatccctttcagctgtaataaagcttccatgacggcgacctcagaaagtgacgccggcacaaagaataatattcgcatacggggaacactccccgctgcgaattaccgcctgactatctgcggtttgttttttgaactgctcatgactggtgtaacgaatttcaatcgtatttccctggtgctgctgcagctgctcaagatgattgagcaacgtcgcgtggagttgcggattatgggttttaatctcttccgcgatgaccgccgcctcaacctgcatttccgccgttacgacttccagtacctgcataaaagaaggtacgccctgagtaagcgccatatcaatgcgcgcgctgctgcggggaaccggcaatccggcgtcgcaaacaaccagcgtatcggtatgaccgaggcgggagataacggaagaaatatcagcgttaagtacggtgccttttttcattttgtctcttttgctccactagcgaaacgtttcgctgccctaagtattgtcaatcagcgaacagaaaaccaccggcagaagagagaaatgtgatcgccatcgaaacgtttcgcaacgcggggacaagaagttacatcaagatgtgagagacaaaaaagcccttcgttattgaagggcttttcgacatcagatttccacctgcgtaccgagctcaataacccggttaggcgggatttcaaactgatccggcgcgcgcaaggcgttacgctgcagcagcagatacagcttgccacgcaggcgcagataccatggccgtttgccaataatcagcgactcgtgggacataaagaacgacgtttccatcattcgacagctcaacccttccaggccgcagcgatggaacacctcttcgacgttcggcgtttcacgccagccatagcttgccacgacgcgccagaacgacggcgacagttgctcaatctgcacgcggcgaacgttatgcacatacggggcatcttcggtacgcagagtcagcaggatcacgcgttcatgcagcaccttgttgtgtttcaggttatgcagcagagcaaaagggatcacgttcagggcgcgagacatatagaccgcggtacccggtacgcgcaccggcggcgatttctccagcgaggagatcatcgcttccagcgagttgccatgctcgtgcatccggcgcagcaggcggaaacgctcgctcttccaggtggtcatcaccgtaaacatcaccaggcccagcgataacggcaaccagccgccggagacgattttatcgaggttcgccgagaacagcggaatatcgatacacaggaaggccaccagcatcaggccgacaaacagcttattccagtgccagtttttgcgcgccacggtcgccgaaagaatggaggtcaacaccatggtgcccgttaccgcaataccgtacgccgccgccagattagaagagtgctcgaagctgacaatgacgatgaccacagaaacgtacagcagccagttaatgaacgggatgtaaatctgcccggactccatttccgaagtatggataatgcgcattggtgacagatagcccagacgcacggcctggcgagtcagcgagaagaccccggaaatcaccgcctgcgaggcgataaccgtagccagggtcgcgataatcagcatcgggatcagcgcccattccggcgccagcaggaagaacgggtttttaatggcttccgggtgcttcagcagcagcgcgccctggccaaaatagttaagcaccagtgatggcagcaccaccgagaaccacgccacgcgaatcggtagtttgccgaagtggcccatatcggcatacagcgcttcaacaccggtaatcgacagcaccaccgcgccaagcgcaataaaggataccgttttgtactgcaggaagaaatgtaccgcccagtaagggttcagcgcctgcagaacttccgggttatcgaggatactgcgagcgccaagcaccgccagcaacaggaaccagatcagcataattggcgcgaacagcttgccgaccatcccggtaccgtgtttttgaatagcaaatagcagggtcagcacaataatggagatggggacaatccaggtatccagctgtggggcgataatttccaacccctctatcgccgacatcaccgatattgccggggttattactacttcaccatagaagaagctaccgccaatcaggccgaggatcaccaacacggaggtcatctttgccgaggtgttgcgccccgccagcgacatcagcgttaagatcccgccctcgccggcgttatccgcccgcatcacgaaggtgatgtatttaattgatacggtaaagatcaacagccagaaaatcagcgacagaaagccaaacaccgcatcgcgttcaacgccaaagccaaactggcctgacagacattcgcgaagagtatacagtggactggtaccgatatcgccgtaaaccacgccgattgccgccagcgttattgccggcaacgattgtttattatcagtgctcatagactagtcttttcgtttataaaacaaatgtgtgcctagtcccttggcccacaaaaagcgcacagtatgcacgattatttgctgaatcgtacccctaactgacaccatattaacttagctcaaagaaaataaatcgattcttcaggctattaccacccctaatcaaacatctatactcgacgcaataacgacacacgacaaagcacgcaactctattatggctcaatcacatttactggcagaaagaatttcccgacttagcgccgccctggaaaaaggactctttgaacgcagccacgcaatacgtctgtgcctgctggctgcgctcagcggcgagagcgtattcctgctgggtccacccggcatcgcgaaaagcctgatcgcccgccggcttaagttcgctttcaagcaggcgcgcgctttcgaatatctgatgacccgcttctccaccccggaagaagttttcggcccgctgtctattcaggcgctcaaagatgaagggcgctatgagcgtttaacggcaggctatctgccagaggcggaaatcgtcttcctggatgaaatctggaaagccggcccggctatccttaataccctgctgacggccatcaacgaacgccacttccgcaacggcgcccatgaagagaaaatcccgatgcgcctgctggttgcggcgtcgaacgaacttcccgaagcggataacagcctcgaagccttatatgaccgcatgctgatccgcctgtggctggataaagtgcaggataaaactaacttccgctcgatgctggtgagccaacaggatgaaaacagcaatccggttcccgaaaacctgcaaatcagcaccgaagagttcacccagtggcagcatgacattggtaccgtgaagttgccggacaatgtcttcgagctggttttccaactgcgccaacaattagatgccttgcctaatgcgccttacgtttccgatcgccgctggaaaaaagccatccgtctgctgcaggccagcgccttctttagcggccgcgacgccatcgcccctatcgacctgatcctgttgaaagattgcctgtggcataacatcgaaagcatgaatctgatgtctcagcagttggaatccctgatgaccagccatgcctggggccagcaggcgatgctgactaaactgggcgctatcatccaacgccgcatccaaatccagcagcagcacagcgataaaaccgcgtttaaagtcacgcgcgtgggcggcatgttcagccgtaagccacattatgaactgccggacggaattgaaggcgagacgttgacgctgcttctccagcaaccgctgaaattgcacgatctcgaagtcattcatatcgccttcgaacgcgaagcgctggtcaactggctggaaaaaggcggcgagatccgcggcaagctcaacggcatcggttttgcccagccattgacgatggatgtcgatgccagccagcacctggtggtgcgcgacgtcagcctgcaaggctcgcgcctgtcgctgccaggcagcgaatctcaggaaaatatgcctgccgagatccgccagcagctggaagcgctggatgacgagtggcaccagcaacataaccgctttagcgaacagcaaaaatgcctgtttattcccggcgactggctggggcgtatcgaagccagcctgcaggacgtcggcgcgcaaattaaacaggcgcgccagccatgacgctcgacatgctgaatgtcatgctggcggtcagcgaagaagggatgatcgaggagatgctgctggcgctgctggcctctcctcaactggcggtgttctttgaaaaatttccgcggctgaaaaatatcatcgccgccgatattccgcgctggcgagaagcggttcgcgcccggctcaaagagacgcaaatccctcctgaactggacgccgaagtgcagatctatcagcaggctcagctgctttcaacgtcgcaatttattgtgcaactgccgcagatcctcggcaagctgcataagctacagtcgccctttgccgctcaggcgcagcagctggtggacgataacgcgaccttcaccccagcgctacatactctgttcttacaacgctggcgcttaagcctcgtggtacagaccaccaccctcaaccagcacctattagacgatgagcgcgatcagctgctcagcgaggtgcaggaacgaatgacgctcagcgggcagctagagccggtgctggtggaaaacgacaacgccgctggccgcctgtgggatatgagcgccggcgagcttaaacgtggcgattatcagctgatcgtgcgctatggcgattttctcagccaacaaccggaactgatgcaactggctgagcagttgggcagatcgcgggaagccaaactggtgccgaagaaggatgcgccgatggaggccttccgcgcgatggttcgtgaaccggcaacggtaccagagcaggtcgatggcctgcagcaaagtgacgatattctacgtctgttgccgccagagttggcaacgctcggcatcaccgaactcgagttcgagttctaccgtaagctggtggaaaaacagttgctaacctatcgcctgcacggcgacgcatggcgggagaaaataaccgaacgcccggtaacccggcaggattttgatgagcagccgcgggggccatttattgtctgcgtagatacctcaggttcgatgggcggctttaatgagcaatgcgctaaagccttttgtctggcgctgatgcgcgtcgcgctggcggataaccgtcgctgctacatcatgctgttctccagcgaagtagtgcactacgagctaaccggcccgcaggggcttgaacaggcgatccgttttttaagccagcgttttcgcggcggcaccgatctggccagctgctttcgcgcgatcgttgaacgtttgcaaagcccgcaatgggtcgatgccgatgcggtggtgatttccgattttatcgcccagcggttgccggatgaggtggtcaataaggtgggggagttgcagcacaaacatcagcaccgttttcacgcggtggcgatgtcggtacacggcaaacccggcatcatgcgcatcttcgatcatatctggcgctttgataccggattgcgtagccgcctgctgcgtcgctggcggcgttaatctttacaacagagcggcgacgctttcacgcacctgcgtgggccatacgccgcactgtacctggccgatatggtcaagctgcagcaacagcatggttaaacgcgactggccaataccgccgccaatggtctgcggcatttcgccgcgcagcagcgcctggtgccattcaagttgcagacggtcttcatcgccggtcaccgccaactggcgcttcagcgcctcggcgtcaacacggatccccatagaggaaagctcaaaagcgtcttccagcaccgggttccacaccaggatatcgccgttcaggccggcaaaaccctccgccgatggcgagctccagtcatcataatccggcgcgcgaacatcgtggcgcttgccgtcagacagtttaccgccgataccgattaagaagacggcgccaagctctttagcgatcgcccgctcgcggcctttggcatccagacccggataacggctcagcagctcctgactgtgaataaagtggatctgttccggcaggaatggcgtcagaccaaattcctgacttaccgccagctcggtggctttgatcccggcgtagatcgcctcaacggtcgctttcaacgtgccagtatggcgttcgccgtcgcccatgacgcgttcccagtcccactggtcaacgtaaacggagtgaattggggtgaggcggtcttcatcggggcgaagggccttcatgtgcgtgtacagcccttcgcccgcgctgaagtcgtgttgtcccagggtttgacgcttccacttcgccagtgaatgaaccacttcgaattgggcgtctggcagtgttttcacttttacctgaaccgctttctcgcagccggacaagttgtcctgcgtcccatctcctacgcggcttaagatcggcgcctgcacttcaatcaggccaagcttctcttccagctggcgggaaaaatgggatttaacgaaactaatctggcgttgttttgcgatgtatgcggttttcattttttattactcctgcgtcctgttgatattgattaagcaacagaaatggcactgaattcaataatcaatcaataaaaagacgccttgagttttgattcattaaattaaaaagctaaaatagaaagaatcatcaaacatcataagaaaaaacaatggaaaattatcagatcgacaatctggaccgcggcattcttgatgccctaatggcgaatgcgcgcaccgcttacgccgaactggccaaacagttcggcgtgagtccaggtacgattcacgtacgcgtagagaaaatgaaacaggcgggcataattacgggggcgcgaatcgacgtcagcccgaaacagctcggttatgacgtcggctgcttcatcggcattattcttaagagcgccaaagactatccttccgctctcgcccggctggagagcctggaggaggtgaccgaggcttactacaccaccggccactacagcatctttattaaggtgatgtgtaaatccatcgatgccctgcagcaggtacttatcaacaagatccaaacaatcgatgaaattcagtccactgaaaccctgatcgtgctgcaaaacccgatcatgcgtaccatcaagccctgatcgttttttttaatcccacatttttccacaggtagatcccagctcgctcacagcgtacaatacgccactcagaatagttgagcgagcgatcggcgatcatggcagacattacacttatcagcggcagcaccctgggcagtgcggaatatgtagcagaacatctggcggaaaagctggaagaagcgggctacagcactgatatccagcacggtccgctggttgacgatctgcaggcagaagggatctggttagttatctcttctacccatggcgccggcgatattccggacaacctggtccccttttatgaagcgttgctggagaagcaggccgatctttctgccgttcgctttggcgcggtgggtatcggtagccgcgaatatgacactttttgcggcgcaatcgacaaactcgaagcagcattaaaggccaacggggcaaaacagatcggtgaaacgctgaaaattaatgtcctcgaacacgagattcctgaagatccggccgaggtttgggtgggatcctggaaagatttactctgagttttgtaaagatccgcagcttcttctgtggataaccctgctcaaaagcttggatcaaccggtagttatccaaagaataaccggagtacgctttttgagctgtgcataacccttcattctgatcccagcttatacggaacaggatcaccgatcattcacagattgcgatccttcttaagcgtttgatcttaaacagtggatccgacttatccacaaagagagtcgatcctaataagagatcacaatagaacagatctctaaataaaagatcttctttttaatactcaggatcccggcccctttctcgaaagagcaaagttgagtagaatccacggcccgggcttcaatccattttcaaaccgcgttatgcgaggcagatcaccatgttttatcaggatccttttgacgtcatcatcattggcgggggtcatgcaggcactgaggccgcgatggcagcagcgcgaatgggccaacaaaccctgcttttgacacacaatatcgacacgctggggcagatgagctgcaacccggcgattggcggcattgggaagggacacctggtaaaagaagtggacgcgctcggtggtctgatggcgaaagcgatcgatcaggcaggtattcagtttaggatactaaacggtagcaaaggcccagctgttcgtgcgacccgcgcccaggccgaccgcgtgctgtatcgccaggcggtacgcaccgcgctggagaaccagccgaacctgatgatcttccagcaggcggtagaagatctgattgtcgaaaacgatcgtgtcgtcggcgcggtgacccaaatgggcctcaagttccgcgctaagtcggtggtactaaccgtcggcaccttcctggatggcaaaatccacattgggctggacaactacagcggcggtcgcgctggcgatccgccgtcgatcccgctgtctcgccgtctgcgtgaactgccgctgcgcgtaagccgcctgaaaaccggtactccgccgcgtattgacgcacgcaccatcgattttagcgtgctggcgcaacagcacggcgataacccgatgccggtcttctcgtttatgggttccgcggatcaacatccgcgccaggtaccgtgctatatcacgcacaccaacgagaaaacccatgatgtgatccgcagcaacctcgatcgcagccccatgtacgccggggtgattgaaggtatcggcccacgttactgcccgtcgatcgaagacaaggtcatgcgctttgccgatcgcaaccagcatcagatcttccttgaaccggaagggctgacttcaaacgaaatttatccaaacggtatctccaccagcctgccgtttgatgtgcaaatgcaaatcgtccgttcaatgcaggggatggaaaacgcgaagatcgttcgccctggctatgccattgagtacgatttctttgacccgcgtgacctgaagccgacgctggagagcaaatacattcagggtctgttcttcgccggccagattaacggcactaccggttatgaagaagccgccgcacagggtttgcttgccggtcttaatgccgcccgcttctcagcggaaaaagagggttgggcgccgcgtcgcgatcaggcctaccttggcgtgctggtggacgatctgtgcacacttggcaccaaagaaccgtaccgcatgtttacctcccgtgcggaatatcgcttgatgctgcgtgaagacaacgccgatctgcgcctgaccgaacaggggcgtgagctggggctggtggacgatgagcgctgggcgcgtttcaacgagaaactggaaagcattgagcgtgaacgccaacgcctgaaaaccagctgggttaacccgctggcggaaagcgcagccgaagtgaacgctcacctgactgcgccgctgtcgcgcgaagccagcggcgaagatctgctgcgtcgtccggaaatgacctacgaacagctggttcagctttctccgttcgcgccgggcctgcaggatcaacaggcggcagagcaggttgagattcaggttaagtacgaaggttatatcgctcgccagcaggacgagatcgaaaaacagcagcgcaacgagaatactttgctgccggcaacgctcgattaccgtcaggtatccggcctgtccaacgaggttattgccaagctgaacgaccataaaccgtcatcgatcggccaggcatcgcgtatttccgggattaccccggcggcaatttctattttgctggtgtggctgaaaaagcaggggatgctgcgccgcagcgcctgataatcgtcagagcgcgttaatttggcggatgcaaaatcagcgttcgcctttataattcacagcccggtaagcgttagcgcctccgggctcattatttttagaaggtactcaccgtgctcaacaaactttctcgtctgctggatgaagcgggtatttcgctcaccgatcaccagaaaaaccagctggtggcgtatgtcgggctgctggataagtggaacaaagcctataacctgacctctgttcgcgatcctaacgagatgctggttcgccatatcctcgatagcattatcgttgcgccatatctacagggctcccgctttatcgatgtgggaaccggcccgggcctgccgggtattccgctggctatcgtgcgcccggaatctcatttcacattactggatagccttggcaagcgtgtgcgcttcctgcgccaggtccagcatgagctaaaactggataacatcacccccgtgcagagccgtgtggaagcgtttcccgccgagccgccgtttgatggcgtcattagccgcgcttttgcctcgctgaacgacatggtgagctggtgccaccacctgccggcggcagatgggcatttctacgcgttgaaagggcaggcgcaggaaagtgaaatggcagacctgccagaaggttaccaggtttgcgatgtgattaaactgcatgtaccccagttggaaggggagagacatttggtggtcattaagccaaacgccttataatttttatcaaaaaatgtggaaaaaatgtggcctgcgcatgttacaaaaatcaaagttacctgcgggtattatctggccacttttaaccttgcttttactatggcttttctagtgtttaactttagcgtggtggtttactggcagaatagtcaactttgaaaatatcagggtgctaaaaatcgatgaactgtcagttcatattgatgttaaatttttattataaatgtcaataaaaggtttttattgtatgtggggttgttttacaaaaagacctcactttttatcttgaatatcaaaaagatgaaaacttactgattctgtacagatttaattcgattgcgccgaaaatgtttattatgtgatctgatgcacgctttaatggccgcgttttctcattatttgcacttctggttgatccctcactgattgacgaaatgcatgaaaaattgccgctcagaaaataattaaacatttattcactattttgctacttaatgtttgaaatcacgtgttgtcaccgtataatttgtccgctttttgacgcttgactcttggtcttaaagaacgttttatacgacacgcggcatacctcgaagggagcaggagtaaaaacgtgatgtctatgtcgctcgtgagtcgaaacgttgctcgaaagcttctgtttattcagttactggcagtaatagcaagtggactgctgttcagcctcaaagaccccttctggggcatctccgccatatgcggaggtttggcagttgttttgccaaacgcgttgtttatgatttttgcctggcgccatcaggcgcatacaccagcacaaggccgagtggcctggaccttcgccttcggtgaagcattcaaggtgttgctgaccttcgccctactggcgatggcgctggcggtttttgaagtggtatttttgccgctgatagtgacgtgggttttggtgctggtggtacaaattctggctccagctgtaattaacaacaaagggtaaaaggcatcatggcttcagaaaatatgacgccgcaggattacataggacaccatctgaataaccttcagttggacctacgtacattctcgctggtggatccgcacaaccccccagccaccttctggacgctcaatattgactccatgtttttctcggtggttctcggtctgctgttccttgccatgttccgtagcgttgctaagagagcgaccagcggcgtaccagggaaattccaaaccttcatcgaaatgatcatcggcttcgtccatggcagcgttaaagacatgtaccatggcaagagcaaggtcatcgcgccgctggcgcttaccgtgttcgtctgggtattcctgatgaacctgatggacctgctgccaatcgacctgattccttatatcggcgaacacattttcggcctgcctgcactgcgcgtggttccgtctgctgacgtgaacatcaccctgtcaatggcgcttggcgtgttcatcctgattattttctacagcatcaaaatgaaaggcgttggtgggttcgttaaagaactgaccatgcagccgttcaatcactgggcgttcattcctgtcaacttaatccttgaaggggtaagcctgctgtccaaaccggtttctctcggtctgcgactgttcggcaacatgtatgccggtgagctgattttcattctgattgctggtctgttgccgtggtggtcacagtggattctgaatgtgccttgggccattttccacatcctgattattacgctgcaagccttcatcttcatggttctgacgattgtctatctgtcgatggcatccgaagagcattgatttttaccaacactactacgttttaactgaaacaaactggagactgtcatggaaaacctgaatatggatctgctgtacatggctgccgctgtgatgatgggtctggcggcaatcggtgctgcgatcggtatcggcatcctcgggggtaaattcctggaaggcgcagcgcgtcaaccggatctgattcctctgctgcgtactcagttctttatcgttatgggtctggtggatgctatcccgatgatcgctgtaggtctgggtctgtacgtgatgtttgctgtcgcgtagtaagttgttcgaaagaaacctaagccacagagttaatttaagaggtattgtgctgtgaacatgaacgcaacaatcctcggccaggccatcgcgtttgttatcttcgtatggttctgcatgaagtacgtatggccgccgttaatggctgccatcgaaaagcgccagaaagaaatttctgacggtttagcttctgcagaacgcgctaagaaagatttggaccttgcacaggccaacgcgaccgaccagctgaaaaaagcgaaagcggaagcccaggtaatcatcgagcaagcgaacaagcgtcgctctcagattctggacgaagctaaagctgaagcagaacaggaacgcaccaaaatcgtcgcacaggcgcaggctgaaatcgatgccgaacgtaaacgtgctcgcgaagaactgcgtaagcaggttgctatcctggctgttgctggcgccgagaagatcatcgaacgttccgtggatgaagctgctaacagcgacatcgtggataaacttgtcgctgaactgtaaggagggaggggctgatgtctgaatttgtaacggtagctcgcccctacgccaaagcagcttttgactttgccgtcgaacacaaaagtgttgagcgctggcaggatatgctggcgtttgccgctgaagtgactaaaaacgaacaaatggcagagcttctctccggtgccctggcgccggaaacgctctcagatgcgtttatcgctatctgcggcgagcaacttgacgaaaacggtcagaacctgattcgggtgatggctgaaaatggtcgtctgaaggtgctcccggatgttcttgagcagttcattcacctgcgtgcggccagcgaggccatcgcagaggtagatgttatttctgccaaccaactgagtgaagaacagcttgcgaagatctccggcgcgatggaaaagcgtctgtcacgcaaagttaagctgaattgcaaaatcgataagtctgttatggcaggagttatcatccgctcgggtgatatggtcattgatggtagcgtacgcggccgtcttgatcgcctggcagacgtcttgcagtcttaaggggactggagcatgcaactgaattccaccgaaatcagcgaactgatcaagcagcgcattgctcagttcaatgttgtgagtgaagctcacaacgaaggtactattgtttctgtaagtgacggtgttatccgcatccacggcctggccgattgtatgcagggtgaaatgatctccctgccgggtaaccgttacgctatcgcactgaacctggagcgcgactccgttggtgcggttgtgatgggtccgtatgctgacctcgccgaaggcatgaaggttaagtgtactggccgtattctggaagttccggtcggtcgtggtctgttaggccgcgtagtgaacaccctgggtgcgccaattgacggtaaaggtcctgttgagcacgatggtttctcgccaatcgaagttatcgctccgggcgttatcgatcgtcaatccgtagaccagccggtacagaccggttacaaatctgttgatgccatgattccaatcggccgtggccagcgtgagctgatcatcggtgaccgtcagaccggtaaaaccgcgatggcaatcgatgcgatcatcaaccagcgtgattccggcatcaaatgcgtatacgtagctatcggccagaaagcgtccaccatctctaacgtggtgcgtaaactggaagagcacggcgcgctgtccaacactatcgttgttgtggcgaccgcttctgaatctgctgcgctgcaatacctggcgccgtatgccggttgcgcaatgggcgaatacttccgcgaccgcggtgaagatgcgctgatcgtttacgatgacctgtctaaacaggctgttgcttaccgtcaggtttccctgctgctccgtcgtccgccaggacgtgaagcattcccgggcgacgtgttctacctccactcccgtctgctggagcgcgcatcccgcgttaacgcggaatacgttgagaagttcaccaatggtgaagttaaaggtaaaaccggctccctgactgcgctgccgattatcgagacgcaagcgggtgacgtttccgcattcgttccgaccaacgtaatttccattaccgatggtcagatcttcctggaaaccaacctgttcaactccggtattcgtccggcggttaacccgggtatctccgtatcccgtgttggtggtgctgctcagaccaagatcatcaagaaactgtccggtggtatccgtaccgcgctggcgcagtatcgtgaactggctgcgttctctcagttcgcatccgatctggacgaagcgactcgtaagcagctgagccacggtcagaaagtgaccgaactgctgaaacagaaacagtatgcccctatgtctgtagcacagcagggcctggtactgttcgctgctgaacgcggttacctcgaagatgtggaactggcgaaaatcggtagcttcgaagccgctctgctggcttacgttgaccgtgaccacgctccgctgatgcaagagattaaccagaccggtggctataacgacgagatcgaaggcaagctgaaaggcatcctcgactccttcaaagcaacccagtcctggtaaagtctggcggcttgccttagggcaggccgcaaggcattgaggagaagctcatggccggcgcaaaagagatacgtagtaagatcgcaagcgtccagaacacgcaaaagatcaccaaagcgatggagatggtcgccgcctccaaaatgcgtaaaacgcaggatcgcatggcggccagccgtccatatgcagatactatgcgcaaagtgattggtcaccttgcgaacggtaatctggaatataagcacccgtacctggaagaacgcgacgttaaacgcgtgggctacctggtggtgtcgaccgaccgtggtctgtgcggtggcttgaacattaacctgttcaaaaaactgctggcggatatgaaagcatggtccgataaaggcgttcagtgcgacctcgcaatgatcggctctaaaggtgtgtctttctttaattccgtgggcggcaatattgtggcccaggtgaccggtatgggtgataacccgtccctgtccgaactgatcggcccggtaaaagtgatgttgcaggcctacgatgaaggccgtctggacaagctttacgttgtcagcaacaaatttattaacaccatgtctcaggctccgaccatcactcagctgctgccgttaccggcttcagaagatgatgatctgaaacgtaagtcctgggattacctgtatgagcccgatccgaaagcgctgctggataccctcctgcgtcgttatgtggagtctcaggtttatcagggcgtggtagaaaacctggccagcgagcaggccgcccgtatggtggcgatgaaagccgcgaccgataatggcggcagcctgattaaagagctgcagttggtatacaacaaagctcgtcaggccagcattactcaggaactcaccgagatcgtctcgggggccgccgcggtttaaccaggttatttcgtagaggatttaagatggctactggaaagattgtccaggtaatcggcgccgtggtcgacgtcgagttccctcaggatgccgtaccacgcgtgtacgatgcccttgaggtacagaatggtaatgagagcctggtgctggaagttcagcagcagctcggcggtggtgtagttcgtgctatcgccatgggttcttccgacggtctgcgtcgtggtctggaagttaaagaccttgagcacccgatcgaagtcccggtaggtaaagcgactctgggccgtatcatgaacgtcctgggtcagccgatcgatatgaaaggcgacatcggcgaagaagaacgttgggctatccaccgtgcggcgccttcctatgaagagctgtccagctctcaggaactgctggaaaccggcatcaaagttatcgacttgatgtgtccgttcgctaagggcggtaaagttggtctgttcggtggtgcgggtgtaggtaaaaccgtaaacatgatggagctgatccgtaacatcgcgatcgagcactccggttactccgtgtttgcgggcgttggtgagcgtactcgtgagggtaacgacttctatcacgaaatgaccgactccaacgttctggataaagtatccctggtttacggccagatgaacgagccgccgggaaaccgtctgcgcgttgcgctgaccggcctgaccatggctgagaaattccgtgacgaaggtcgtgacgttctgctgttcgtcgataacatctatcgttacaccctggccggtactgaagtatctgcactgctgggccgtatgccttcagcggtaggttatcagccgactctggcggaagagatgggcgttctgcaggaacgtatcacctccaccaaaaccggttctatcacctccgttcaggcggtatacgtacctgcggatgacttgactgacccatccccagcaaccacctttgcgcaccttgacgcaaccgtggtactgagccgtcagatcgcgtctctgggtatctacccggccgttgacccgctggattccaccagccgtcagctggatccgctggttgttggtcaggaacactacgacaccgcgcgtggcgtacagtctctgctgcagcgttatcaggaactgaaagacatcatcgccatcctgggtatggatgaactgtctgaagaagataaactggtggtagctcgcgctcgtaagatccagcgcttcctgtcccagccgttcttcgtagctgaagtatttaccggttccccgggcaaatacgtttcgctgaaagacaccatccgtggctttaaaggcatcatggaaggcgaatacgatcacctgccggagcaggcgttctacatggtcggttccatcgaagaagccgtggaaaaagccaaaaaactttaacgccttaatcggagggtgatatggcaatgacttaccacctggatgtcgtcagcgcagagaaacagatgttctctggcctggtcgagaaaatccaggtaacgggtagcgaaggtgagctgggtattttcccgggtcacgcgccgctgctcaccgccattaagcctggtatgattcgcatcgttaaacagttcggtcacgaagagtttatctatctgtccggcggcattcttgaagtgcaaccgggcaacgtgatcgttctggccgatacggcaattcgtggtcaggatctcgacgaagcgcgagccctggaagcgaaacgtaaagcggaagagcacatcaagagctctcacggcgacgtggattacgctcaggcgtccgcggaactggccaaagcgatcgctaaactgcgcgttatcgaattgaccaaaaaagcgatgtaacaccggcttgaaagctaaaagccagtctggaaacagactggctttttttatgcttaatacgtcagcggtgacgtcggacaaaacacactcccccttaattgttattgattagttaaatgatgaagcgtagactgatttttgtgatgcaaatcacaaaaaaacactgtcaaaccgcacctgcaatctggaaatcatcatgaaactgttccataaaatcatcgccaaatttagcgccctgagcttctgatcgccgcgctaccgtcctgctttcacgcactatcgctcatcaaaacgacaactcatgcgatgtgaaacaacggaaaagaggtcacccgagggtggcctctttgctttttatgcctctctttaaccactttccagcccaaactcattgaccttccccgcccgggacaggctaaaattctgtcaggttgccaacttacgatttatcggcgacaacggtaaacactgctttattcaagtggtaaaaaaacagcaaaagcagtgagatagaaggccattcccctcactatcatcgtttttcagcgttaaactgttttacgatggttaaaaatagcgccctaaaatggtgtatagcattgagcctggacgttttctccgcgtctcgtttcatgatgaaaaatatgtagcaatttcaacgtgaaaggcttttacttttcgttctaacagctgtcaggatgcgtatgtcaaacagtgcgatgagcgtggttatccttgccgcaggcaaagggacccgcatgtattccgatcttcctaaggtgctgcatactctggccgggaagccaatggttcagcacgtcattgatgcggctaaagatttaggcgctgccgcggtacacttggtgtacggccacggcggcgatctactgcgtcaaacgctgcatgaggataacctcaactgggtgctgcaagcagagcagctcggtaccggccatgcgatgcagcaggcggcgccgttcttcaatgatgatgaagatatcttgatgctctatggcgatgtgccgcttatttcggttgaaaccctacagcgcctgcgcgccgcaaaaccgcagggcggtattggcctgttgacggtgaaactggatgatccaaccggttatgggcgcatcacgcgtgaaaatggccaggtgacaggtatcgttgagcataaagacgccagcgaagcgcagcgccagattcaggaaatcaataccgggattctggttgctaacggcgcggacctgaaacgctggctggcgaagctcaccaacaataacgcccagggcgaatactacatcaccgatattatcgcgatggcccatcaggaaggtcatgagatcgttgcggtgcatcctcagcgcctgagcgaagttgaaggggtgaacaatcgcctgcaacttgcgcgtctggaacgagtgtatcagtcagagcaggcggaaaaactgctgttggcgggcgtgatgctgcgcgatccggcgcgtttcgatctgcgcggcgtgctgaaacacgggcgcgatgtcgaaattgatactaacgttattctgcaagggcatgtcgtgctgggcgatcgcgtgaagatcggcgccggctgcgtcatcaaagacagcgtcatcggtgatgactgcgaaatcagcccgtatagcgtggttgaagatgcgcagctgcaggccgcctgcaccatcggcccgtttgcgcgtctgcgtccgggggctgagctgctggaaggcgctcacgtcggcaactttgtcgaaatgaagaaagcgcgtctgggcaaaggctcgaaggcaggacacctctcctacctcggcgatgctgaaattggcgacaacgttaatatcggcgcgggtaccattacctgtaactatgatggcgcaaataagcataaaacgatcatcggcgatgatgtgtttgtcggttctgatacgcaactggtcgcgccggtcagcgtcggtaatggcgtgacgattgccgcgggcaccaccgtcacgcgtaatatagctgacaacgaactggtgttaagccgcgtgccgcaagtccacaaacagggctggcagcgaccggtgaagaaaaagtagtgattagattgtcgccgggtgagagatcgcccggcgaaccaggatgagaggatcaatataggtccccgtccgcaggcagtaccataaaaataaccccactctctacaaggctcggggcgcccgtaaagggcaaatacaggtcagcgacaacgcatggcatatcgccattatcaggaaatttaactatgtgtggaattgttggcgcagtcgcgcagcgtgatattgctgaaatacttctcgaaggtttacgtcgtctggaataccgtggctatgactctgccggtctggcagtggtcgataacgaaggtcatatgacccgcgttcgtcgtctcggtaaagttcagatgctggctcaggcggtagaagagcaaccgttacacggcggtaccgggattgcccatacccgctgggcgacgcacggcgagccgtctgagagcaatgcgcatccgcatgtttctgaacatattgctgtggtccataacgggatcatcgagaaccatgagccgctgcgcgccctgctgcagtctcgcggctatgtctttgtctctgagaccgataccgaagttatcgcgcacctggtgcactgggagctggaacagggcggcaccttgcgtgaagccgtactgcgcgcaatcccgcagctgcgcggcgcctatggtacggtgatcatggatacccgcgatccggggacgctgctggcggcacgttcaggcagcccgctggtcattggcctgggcgtgggcgaaaactttatcgcttctgaccagctggcgctgctgccggtgacccgccgctttatcttcctcgaagagggcgatattgccgaagttacccgtcgtacggtggtgattttcgataaatccggcgcggaagtgaatcgccaggagatcgaatctaatctgcagtatgacgccggtgataaggggatttatcgccactatatgcagaaagagatttacgagcagccgaacgcgattaagaacaccctgaccgggcgcatcagccatggcgaggtcgatctcagcgagctggggccgaatgccaacgcgctgctgtcgcaggttgagcatatccagattgttgcctgcggaacctcgtataactccgggatggtctcccgttactggttcgaagcgttagccggcgtgccgtgcgatgtcgaaattgcttcggaattccgctaccgcaaatccgcggtgcgccgcaacagcctgatgatcaccctctcccagtccggtgagacggcggataccctggcggcgctgcgcctctctaaagagcttggctatcttggttcgttggccatctgcaacgttccgggctcttcgctggtgcgcgagtctgacctggcgttgatgaccaaagccggtaccgaaatcggcgtggcatcgaccaaagcctttaccactcagttgaccgtgctgttgatgctggtggcgaaactggcgcgtctcaagggccaggatgcggctatcgagcaggatatcgtgcatggcctgcaggcgctgccgaaccgtatcgagcagatgctgtcgcaggataagcgcatcgaacagctggcggaacgtttctccgataagcatcacgcgctgttccttggccgcggcgatcagtacccgatcgcgctggaaggggcgctgaagctgaaagagatctcctacattcatgctgaagcttatgcggcgggcgagctgaaacacggcccgctggcgctgattgatgccgaaatgccggtcatcgttgtggcgccgaacaacgaactgttggaaaaactgaaatccaatattgaagaagttcgcgcccgcggcggtgaactgtacgtcttcgccgatggagacgccggtttcagcggcagcgacaacatgcacatcatcgagatgccacatgtcgaagaggtgattgcgccgatcttctacaccgtgccgctacagctgctggcttatcacgttgcgctgatcaaaggcaccgacgttgaccagccgcgtaacctggcgaaatcggtgaccgtagagtaatcaggctgtacggaccgacactcttgtgagtgacgctataatccggtatttctgcaaagggataccggatttttatatcagctatcagcggttgattgtgtgtttgcggatagcgttaccgccattgcttataaaaaaccatctttttaggagtgagttgcccaacatctcaacgttgccagatgattttacgctatccataatgatgtaataaaagcaaaaacttcctgtcatatgaccaaaagataaaagtgtaatcaattgatataattaattttattttaggttttcttactttgccctggcatgtcataaaactgtcataattcgtacattttactgtcacctgtttgtcctattttgctcaccatagcttcgaaacaacggtttacgaatcccagcaggagacattatgaacgttatgcgtaccaccgtcgcaacagttgtcgccgcgaccttatcgatgagcgctttctctgctttcgcagcagcaagcctgactggcgcaggtgcaactttccctgctccggtgtatgccaaatgggctgatacctatcagaaagaaacgggcaataaagttaactaccagggtatcggttcctctggcggcgttaaacagattattgccaacaccgtggatttcggtgcttctgatgctcctctggctgatgacaaactggcgcaggaaggcctgttccagttcccgaccgttatcggcggcgtggtgctggcggttaacctgccgggcgttaaatccggcgagctggtgctcgatggtaaaaccctcggcgacatctatctgggcaaaatcaaaaaatgggatgacgaagcgatcgctaaactcaaccctggcctgaagctgccggctcagaacatcgccgtggttcgccgcgcggatggttccggtacttccttcgtcttcaccagctatctggcgaaagtgaacgaagagtggaaatctaaaattggcgcaggctctaccgtaaactggccaaccggcctgggcggtaaaggcaacgacggtatcgcagccttcgttcagcgtctgccgggcgctatcggctacgtcgagtatgcttacgctaagcagaataacctggcctacaccaaactgctgtccgctgacggcaagccggtcagcccgacggaagataacttcgctaatgcggcgaaaggtatcgactggagcaagtccttcgctcaggacctgactaaccagaaaggtgaaaatgcatggccgatcacctcaaccactttcatcctcgtccacaaggcttccaataagccggagaataccgcggaagtgctgaagttcttcgactgggcatacaaaaacggcggcaaagaagcgaatgcgctggattacgccagcctgccggacagcgtggttgagcaggttcgcgccgcatggaaaaccaacgtgaaagacagcagcggtaaagcgctgtactaatacccgcggaatgtcgagctgccggctagcttccagcagctcgaattatttcgggtatagcattacctttgcccgtaagctcagtaaaatgctggctttttgggcccgaacttaaagagtaacctatggctgcaaccaagccggcattcaaccctccggggaaaaagggtgacatgatcttcagcgcgctggtgaaactggctgcgctgattgtgctattgatgctgggtggcatcatcgtttccctcatcatctcttcatggccaagtattcagaaatttggcttttcctttttgtggaccaaagagtgggatgcgccgaatgaaatcttcggtgcgctggtaccgatttacgggactctggttacctcaattatcgcgttgttgatcgccgttccggtgagcttcggcatcgcgctgttcctgactgaactctccccggcctggctaaaacgcccgctgggtatcgctattgagctgctggcggcaatcccgagtatcgtatacggcatgtggggcctgtttatttttgccccgctgtttgcgacttacttccaggaaccagtcggcaacgtcctttcgacgatcccgtttgtcggcgcgctgtttgccggcccggcgttcggtatcggcatcctggcggccggcgtcattctggctatcatgatcattccttatatcgccgccgtaatgcgtgacgtcttcgagcagacgccggtgatgatgaaagagtccgcatatgggatcggctgcaccacgtgggaggtgatttggcgcatcgtgctgccgttcaccaaaaatggggtgattggcggcgtcatgctcggcctgggccgcgcgctgggtgaaaccatggccgtcacctttattatcggtaacacctatcagctcgacagcgcttcactgtatatgccgggcaacagtattacctcggcgctggccaatgaattcgcggaagcggaaagcggcctgcacgtagcggcgctgatggaactgggtctgatcctgttcgttatcacctttatcgttctggccgcgtcgaagttcatgattatgcgtctcgctaagaacgagggggcacgctaatggcaacgatcgaattgcaaaccaccgccgcgctggcggaatcccgtcgcaagatgcaggctaagcgccgcctgaagaaccgcatcgccctgaccctgtcgatggcgaccatggcattcggcctcttctggcttatctggatcctgatgtcgaccattacgcgtggcatcgacggcatgagtctggcgctgtttaccgaaatgacgccgccgccgaataccgcgggcggcggtctggcgaacgccctggcgggcagcggcctgctgatcctgtgggcgaccgtttttggtacgccgcttggcatcatggccggtatctatctggcggagtacggcagaaagtcggtactggcggaaatcatccgctttattaacgatattctgctttccgcgccatctatcgtcgtggggctgttcgtctacaccatcgtggtggcgcagatgcagcacttctccggctgggcgggcgttatcgcgctggcgctgctgcaggtgccaatcgtgattcgtaccactgaaaacatgctgaagctggtgccggatagcctgcgtgaagcagcctatgcgctggggacgccgaaatggaagatgatttccgcgatcacccttaaggcgtcggtatccggcattatgaccggtatcctgctggccattgcccgtatcgccggggagacggcgccgctgctgttcaccgcgctctccaaccagttctggagcaccgatatgatgcagccgatcgccaacctgccggtgaccatttttaaatttgccatgagtccgttcgcggaatggcagcaactggcatgggccggggtattgattatcaccctgtgcgtcttgctgctgaatattctggcgcgcgttgtcttcgcgaagaagaaacacggttaatttttgcggcgcggcctaagcggcgccgaatgaggaagagattgagatgagtatggtgaacgcgaatccgggtaaaatttcagttcgtgacctgaacttctactacggcaaattccatgccctgaagaacatcaacctggatatcgctaagaaccaggtgacggcgtttatcggcccgtcaggctgcggtaaatccactctgctgcgtacgttcaacaagatgtttgagctgtacccggagcagcgtgcggaaggcgaaattctgctggatggcgacaatattctcaccaatacccaggatatcgcgctgctgcgcgcgaaagtagggatggtattccagaagccgacgccgttcccgatgtctatctacgacaacatcgccttcggcgtgcgtctgttcgagaagctgtcgcgtgccgatatggacgagcgcgtacagtgggcgttgaccaaagccgcattatggaatgaaaccaaagataaactgcaccagagcgggtattctctctccggtggtcagcagcagcgtctgtgtatcgcccgcggtatcgcgattcgcccggaagtgctgctgctcgatgaaccttgctcagcgctggacccgatctccaccgggcgcatcgaggaacttatcaccgagctgaagcaggattacaccgtcgttatcgttacccacaacatgcagcaggctgcgcgttgttccgaccatacggcatttatgtatcttggcgagctgattgaattcagcaacacggacgatctgtttaccaagcccgctaagaagcaaactgaagattatattactggccgctacggttgattgcccttctgctttcaggtgctaacccgatgggcaatcaggagacatcatggataacttaaatcttaataaacatatttccggccagttcaacgcagaactggagtacattcgcacccaggtaatgaccatgggtgggctggtggagcaacagctttctgatgcgatcaccgcgatgcacaatcaggacagcgatctggcgaagcgcgtaatcgatggcgacaagcaggtcaatatgatggaagtggcgatcgacgaggcctgcgtgcgcatcatcgctaaacgtcagccgaccgccagcgacctgcggctggtgatggcgatcatcaagactatcgccgagctggaacgtattggcgacgtggcggataaaatctgccgtaccgcgctggagaagttttcccagcagcaccaaccgctgctggtgagcctggagtcgctaggccgccataccgtacagatgctgcatgatgtgctggatgcctttgcgcggatggatcttgatgaagcggtacgtatctatcgcgaagacaagaaagtcgatcaggaatatgaaggcatcgtgcgtcaactgatgacctatatgatggaagattcacgtactattccgagcgtcctgaccgcattattctgcgcgcgctctatcgaacgtatcggcgatcgctgccagaatatctgcgaatatattttctacttcgttaaaggccaggatttccgtcacgtaggcggcgacgaactggataaactgctcgcgggtaaagatccgaaagagtaaaaatcatggtggccgattctggtaaaggaaattatcagaatcgactatgattttgcacatctctgaaatattgctgcgattatcgtcacaattaatactctggctatttgagttttaaattttctcgcgtaacaatccttctcactgactgagcgctgaagctcagatggttaaaatggattgttactgcgacagcaggcaaaacctgatattgccccagacggcgatgtcaggtttttttgttttagacgctgaatggtttgctgataagggttgctaccgcaatgagcgggcaaaacctgaagaggattatctgttaatgcagatggtctccttcagtttttttttgccacttattcggcatgaaaataaaagctgcagttacgtggaatggtattaatgcagtttattaaaaacataacgctatttattcgttacgtgtttcatttacgccaatgcttatataagggattattatgattagaagaaatatgatcgcttcggcgatggttttgctggcgccgctttcttattcaacaaatcttattgccggacagcttacggttgaacaacgattggagcttctggaaaaagcgcttcaggacacgcaaaaagaactcaagaaatatcaggatcaggagaaaaaaagaaaccaggtttgggccgcctggtcgcaaccggtaaatagccagaagagccagagtgcgaaagcgcctacggcgacccaagcggccgttaagccagacgcggtactggtcaaaaatgaacagccggcgcagggcggtgagccagcctatagcgccatgacgctgaaagattttagtaaattcgtgaaagatgaaattggctttagctataacggctattaccgttctggctggggaactgcctcgcacggctcgccaaaatcgtgggccatcggctcgcttggccgtttgggtaacgagtattccggctggtttgatttacagcttaaacagcgtgtttttcaggaaggcgacaaacgtgtggacgccatcgtgatgctcgatggcaacgtgggtcagcaatattctgccggctggtttggcgacaacgccggcggcgaaaactaccttcagttctcggatatgtacgtcaacaccaaaggctttttgccgtttgccccggaagcggatttttgggtcggtaagcacggtgcgccgaaaatcgagatccagatgctggactggaaaacacaaagaaccgatgcggcagctggcgtagggcttgaaaactggaaagtgggcgccggtaaatttgatttcgcgctggtgcgcgaagatattgatgattacgaccgctctttgactaataagcagcaaattaataccaataccctggatgtgcgttacaaagatattccgctgtgggacaaagcctcgctgatggtcagcgggcgctatgtcgccgccaatcaaagctcatcagagaaatataaagaggggaatgaaggttactaccaatggaaagatacctggatggtgggaacttcgttaacgcagaaatttgataacggcggctttaacgagttctcattattactggcgaataactccatcgccagcagcttctcgcgctatgccggttcgagcccgtataccaccaataatgggcgctattatggcgatcataccaacggcaccgccgtgcgcttaacctcgcagggggaaacctatttgcgtgatgatgtcattatggcgaatgcgatcgtctactcatttggtaatgacgtctatagctacgaaaccggcgcccattcagattttgaatctattcgcgccgtggttcgcccggcatatatctggaataaatataatcagaccggcgttgaattgggctacttcaaacagcagaacaaagatgtgacgggtaagaaatataacgaatccggttataagaccaccttattccataccttcaaagttaataccagtatgctgacctcgcgcccggaaatccgtttttatgcgacttatattaaagccgaagatatcgacctggataaggccgctaacaataccaccgcggtttttgaagatggcaagaacgaccaattcgcactcggcgcgcaggccgaaatttggtggtaaggccgcaagcgcctgctcataaaaacgtaaaaggaatcaagatgaaacgacatgcaatctacttcaccctggcgctggctggcgccacatttacggcgcacgccgcaccgctgccgacgatgcctgatgccgccattcctgtcagccaatatattactcaggtgaatacggataacagtgtgactttccggttatttgcccccgatgccaggcgtgtttccgtcgtcacggggtcgacgccggatacctttgtctctcatgacatgaccaaagatacccagggcgtatggacgtggaagagcgatcgcctggccgccaatctttatgagtactacttcgacgtggacggttttcgttctgtcgataccggcagccgttatcagaagccgcagcgccaggtgaataccagcctgatcctggtgcccggcagcattcttgacgaacgggcagtcccgcacggcgatctgcgtaccgtcacctaccattcgacggcgctcaagtcagagcgtcgcatctacgtctggacgccaccgggctataatggcagcggcgagcctttgccggtgctctacttctaccacggttttggcgatagcggtctgtcggccatcgaccaggggcgcatcccgcaaatgatggataacctgctggcggagggcaaaatcaagccgatgctggtggtggtgccggataccgaaaccgatattcctcaagcgatcgcggaaaacttcccgccgcaggagcggcgtaaaaacttctatccactcaatgcgaaagccgcagacaacgaattgatgcacgacatcattccgctgatcgattcccgatttaacgtgcgtaaagatgccgacggccgggcgctggcagggctgtcgcagggcggttaccaggcgctggtgtccgggatgaaccatcttgagagcttcgggtggcttgccacctttagcggggttacgacaaccacggttcccgatgctggcgtggaggcgcagctgaataaccctgacgccatcaataagcaactgcgtaactttacgctggtggttggcgaaaaagactccgtcactggcaaagatattgccggcctgaaaagcgaactggaaaagcagaagatcaaatttgattatcactcttatcctggcctgaatcatgaaatggacgtctggcgtccggcctatgccgagtttgtgcaaaagctctttaaataaccgtcagggggcatggcgccccctgtctcaaccagtaaaggaagatgagatgaaattgattgtgacggaagattatgaagagatgagcctggtcgcctgccatcatcttttaggctatatcacggtgccgcgacggatgaatctggcggtgacggcggggagtacgccgaagcgtatgtatgagcatttggtggccgccatcaaagggaaatcattctatgatcgggttcactattacaactttgatgagataccttttcgcggccagcagcgtgaaggagtgacgatttccaacctgcgtcagctattttttactccagcgcagatcaaagaagagaacatccataaattgacgctggagaacgcggctcaacacgatcgccgcctcgaagaggccggcggtcttgacctggtcgtgctggggctgggcgtcgacggccatttttgcggcaacctgccgaacactacacgttttcatgatgagacggtcgaagtaccgattcagggggagctgattggcattgtcgcgaacggcgaaatggggggcgatttcaatgtggtgccggatagctatgtcaccatggggccgaaaagcgtgatggcggcaaaaaacctgctgctgattgtcagcggcgcggcaaaggcgcaagcgctaaagcaggtggtggaaggcccggtcagtgaactggtgccggcctctgtactcaagttgcacccttcgttggtgattattgcggataaagcggctgcggcggaattgcagcactaaaaagccgctggccagcggggctaccgttgtgaccaaccgtagcccgaccgagcgtagtgacgtcgggtcttaacgagtaatatcccagccacgcgctctccacaatgccggcagctcagctaaatcggtaaaggtcgttactttcggatgatcgatcggttggttgtgcgggtcggcgcagaagtaaaagacttccatacccgcggcaattcctgattgggctcccgcgctggaatcatcgaccagaatacagttttcgacttgtacctgcatggcctctgccgcatggaacatcagcgccgggtcgggtttccagcgctgaatgtcgtaaccgctgtacagccggtctgggaagtggtgcagcatctgcgttctaccgagcgaatgctgcattttactgaccgggccattcgacaccacgcacatggggattttcaccgcgtccagcagcgcagcggcgccggggatgatctccagctcgctatcgaacagacgggcgacttcggcgcgatacaccggctccagagtctctttctgcaggttaacgccatattcagcgttgatggtgtcgataatctcgtacagcttaacgcccttgaagcgcttaaaaatttcggctaaatccagcgtaataccgaattcctgaaacatgtgaacataggcgcgtgagcaaatcacctcgctatcgaccagcgtgccgtcacaatcgaaaaatactgcttgtggttgggtcatactctttccagtttaacaagtttaacgttttcgtaatgctcaatgccgcgacgcaatcgttgccgtataagcaaaataaatgaaaaaaattaccatacaaccgcgcctggtgccgtaatttggtataggatagcctcgaattttccctcctttacgttcggaaaccgataatgagtcaacaaccaaccagccagtcttctggccagggtctgctggagcgcgtatttaaactgcgcgagcacggcaccacggtgcgcactgaagcgatcgccggtttcaccacgttcttgacgatggtctacatcgtcttcgtgaacccacaaattcttggcgtggcgggtatggataccagcgctgtctttgtgaccacctgtctgatcgcggccttcggcagcatcctgatgggtctgttcgcgaatctgccggtggcgctggcgccagcgatgggtctgaatgctttctttgccttcgtggtagttcaggcgatgggcctgccgtggcaggtgggtatgggcgcgattttctggggcgccgtcggcctgctgctgctgaccctcttccgcgtacgctattggatgattgccaatatcccggtgagcctgcgcgtgggtatcaccagcggtatcgggctgtttatcggcatgatgggcctgaagaacgccggcgttatcgtggcgaaccaggacacgttggtcagcatcggcaacctgacttcccacagcgtgctgctgggcgtgctcggattctttattatcgctatcctggcatcgcgtaatattcatgccgccgtgctggtctccatcgtcgtcaccaccctgttgggctggatgctcggcgatgtgcactataccggcatcgtctccgcgccgccgagcgtaacctcggttgtgggtcaggtcgatctggccggttcgctgaaccttggcctggcgggcgtgatcttctcgttcatgctggttaacctgttcgactcctccggcaccctgattggcgtcaccgataaagccgggctggcagatgcgcagggtaaattcccacgcatgaagcaggcgttgttcgtcgatagcgtgtcgtctgttgccggctcctttattggcacctcttcggttacggcctatatcgaatcctcctccggcgtttcggttggcgggcgtactggcctgaccgccgttgtcgtaggtatcctgttcctgctggtcatcttcctgtcgccgctggcggggatggttccggcctatgccgccgctggggcgctgatttacgttggcgtgctgatgacctcaagcctggcgcgagtgaagtgggatgacctgacggaagcggtacctgcgtttatcaccgcggtgatgatgccgttcagcttctcgatcaccgaaggtatcgccctgggctttatttcctactgcgtgatgaagattggtaccggccgtctgcgtgaactcagcccgtgcgtgatcatcgtttcgctgctgttcgtgctgaaaattgtctttatcgatgcgcattgatccgcacgcatgatgaaatggcccggcatcgctgccgggctttttttatgctttaacccgctgaatataatcgccaaaggcggtcaactggccgcgcagatggtccagcgtgctctgatcgaccacttcacccgcctgcggatcgactttgttctgaatcacaccgcccataaattccggcttgttcatgaccatcgcatcaaggaagaccagaatctggcgcagatgatactggcagcgcgccccgccgatagcgcccattgagctggtctggatcagcaccggcttaccggccagcggctgttccggcagacgcgagagccagtcgatagcgttcttcagaccgccgggtaccgagtagttatattccggagtaacgatcaccacgccgtccgcttcgcggatttgtttcgcgatcgcctgcacgctctgcgggaacccctcttcctgttggatatcggcatcgtacagcgggatatcgccgatcgacggcagcgcggagatttccatgcccgcaggcgcaatgcccggcagcgtacgcgcaaccatggcattaaaagaacctttgcgcagacttccgagtaacgtaacaactttcaacgtatcagacatgagtgctcctttgcatcatgatggccggctaaaccggtcagttgagggagaatactttttctaccggtaagctggtaaagcgcatcaggcgcgcgtcagtctctttggcgcgcgtttgcgcatcaggcaggcagcgccagccctctttactatcaaattcccagaccttcagcggcccgatattcggggtgacggcaattgaccacaccagcaacgtttcagcatcacagatggcttcaatcgattgggtgccagcggtacgcaggcgaccagaccccggcagcagttgtacccgtaccggggcttcaccggtgagcttcagcacgctgcggcgcagcgcgaccagctgggcgcgggcttcatccggatcgtgctggatgttaatccataaattctcattgctattgaagacatagcgatcggcggcatgcagcggatggacgccacgcgaggcgtgctgcagttccatatccagaccgcagtcaccttcggtcgtcagcgctacgccgacaatattcccggcataagagatggaaaaacggggaagatggggatcgcgaaatacgggccgtccattgggttcgctgatgatttccggcagttcgccgataccataaagcatgaaaagcagttcagcgagcagcgaacgcgaggcgcgatagcggctctgtcggtattcgggtaggttacgtgcggattgatgacatgccgccgacaaacgcgtcgatagcggctccctggtgttgagtatccctcttgcaaaatgcgttgccattcgtcgctccgtgattaatggtcagagataaaaattgtgaatgatattatcgctcacaatgagcaggttttaatgcggaaattcttccttgagaagggataatgtctgacttttacaatttcttgcgcaacaacgtgaggatgatgggcaatttccctacagcgtattggaatagagctgtttgagggtctctctgagccatacgatctttggattatagctattacgcttatgccacagcagggtgaacggcacgcgcattttttccagtagctgcggctccagcggcagcgggcgcgataccagcggcagatgatgctgctgattatagtgctgacaatagcgcggcgcggtggctatcatggtgtgattcggctgcgctgccataaacagcgactgttcaaagccgggtagggtcagcgcgacggtgcgcttgtagcccagatcatgtaacacatcatccagcgcccaggtatcgctctgttcccagcagatgttgatgtgcggatagcgcaggaaagccgccaggttccactcttcattaagcgccggatgatcggcgcgcagccacacctgcggcaggtcgctaaacaggatatcaaaatcgatataccacggcagcaggctcagctgttcgcgcgaacggggatgggtttcccggccgcaaaaaccgatatcgacctcgccgcgaatgatggcatccagcgagtcgtaatcccagttgcgtaaacggatcagcgcttgtggataacgttgataaatttgttgggagagggtgttgaacaggatcatcagcagcggtgattctgccgccagctcgaacttcaggccgcttggcatagtgtggtgcggtttatcgaggatctgattgcccatctgcatccagtcggcaagatcctgctccatgctgctcattaacggcgttggcgccagccctagcggtgttttaacaaacagcggatcgtcaaaccaggtgcgtagcttggccaatgatttactcaccgccgacggcgaaacgttcatccgtttcgccgtgcgggtgacgctgcgctcctgggtcagaagctgcagacataacagtaagttaagatcgagactcgacagggatttcttcatcatattgcgtcgcgcgcgccggcgagacgaccagtatcagaacaatactgactatgctacaggcaatgagtatcccgatcagcatattcatggcgctaagcccaatgatagccgccagccaaatccacagcgaagaaccacagacctgggcgatgccgagggcggagctggcgacgcccgcccgcagcgtgaaaggccccaacgcctggctcatcgcgacgccaaagccaaccgagaaacccgcgcagatcatacctaatcccagcatggtgatgggctggctggcggcgaggctcaataccacgccagcgataaggaacaacgtctgcgaggtcagcatcagggtacgtggtttaaacagcgtcagagcgaacggcgtggagaacgacacggccatgctgaccattgccatcagcgccatcgccattgaataagttccgcggtcgaaacccatctcttccatcatcagtaccggtgagacgtttacgtaggtcaaaattgcggtgacgctgagagtcgtaatgactatgcggctgaggaaaaaacggtttagcagcgactcagcggcgccattgtgctgtgcgcctgcctgcggatgcgttgtcgggcgcgtctcacgcaggataaacaccgacaataaccccaccatcacccccatgcctgtcatggtgtagaacaggctctgccacggatatttcaacatgatcagatggccaagtaccggcgcgagaacgggaataatgcaggtaatgccattaagcagcgacagtaccttggcgcggcggcgctcgtccagcgtatcgcgcagaacggcaaaggcgacgacgtagcagcttcccgcgccgatcccctggataaagcggccgatcaggaaatgcgtgctgttatgcgcctgcgagcacagcaacgaggccagtatgaaggtgatggcgccgaaaatcgcgaccggtttacgcccggatttatccgccactcgcccggcaaaaagcatcgcggtagccatgccggctaaatagaccgaaaaggcgatatgcagctgtgcctcgctggcgccaagatcctgggcgatgcgcggtagaccgaccagatacatatcaatgccggatggatagagcagtaccaatgcgaaactgcagataagaaagcgtgccataggaccctcgcaataagaatggcgtacagcatagtggctaacgccagggagtacgagttgccatttggacaacactcttttcctgcagggaaaaacagttgattgcttcacagagttgatgtgattaaggcaatcaaataaaaaacccgccataacagaaggttaaggcgggttagtagatgcttaccagtaacgcttacttaccgatacagaaactggagaaaatacggcccagcagatcgtcagaggtaaattcgccggtgatttcgcttaatgcctgttgcgacagacgtagctcttccgccagtaattcaccggcccaggcgcccagcaactgcgctttgccctgctgcagatggtccgcagccgtttccagcgcttgcaggtggcgacgacgggcgaggaagccgccttccatgttggtatcgaagcccatgctctgcttaaggtggttgcgcagcacctcgaccccttcaccggtacgcgccgacaggcggattagtgagtggccatttacttcgctgagccccagcgcttcgccggtgacatcggctttattacgcaccacggtaatcggcagcttagcgggcaggcgctcgataaagtccggccagatctccgccgggtcaacggcgctggtggtggtgccgtcgaccataaacagcacccgatccgcctgttcaatttcctgccaggcgcgttcaatgccgatgcgctccacttcatcactggcgtcacgcaggcctgcggtatcgatgatatgcagcggcataccgtcgatgtgaatatgttcgcgcagtacgtcgcgggtggtgccggcgatatcggtgacgatcgccgcttcgcgtccggccagcgcgttgagcaggcttgatttaccagcgtttggccgtccggcgatcaccactttcatcccttcacgcagcaggctgccctgacgggcttcggcgcggacggcatcgagatcggcgatcacgtcgttcagttgggcttcaattttaccatcggagaggaaatcaatttcttcatccgggaaatcaatcgccgcttccacgtagatgcgcaggtgagtgagcgcttccacaagatggttcacacgcgcggagaaggccccttgcaaggagttcaacgccgaacgggccgcctgctctgagctggcgtcgataaggtcggcgatggcctctgcctgcgccaggtcgagcttgtcgttgaggaacgcgcgctcggaaaactcgcccggattggcgatgcgaacgccgggcaaggtcagaatacgtttgagcagcagatccagaatgaccgggccgccgtggccctgcagttcgaggacatcttcgccggtaaaggagttcggccccggaaaccacagcgcaatcccctgatccagcggcgtaccgtcggcgtctttaaacggcagatagtcggcatagcgcggcttcggcagcttgccgagtaccgcctgcgcgacgtcgcgcgccttaaggccggagatacgcaggatgcccacacccccgcgtcccggaggggttgcctgggcgacgatagtgtcgttatggctcatgatatgtctcttcaaatcgcaataaaaaaaggcggtcattcgaccgccttttgattgtaggcctgataagcgttagcgccatcaggcaacccggcgcgcattgccggatggcggcttcgccttatccggcctacaccgaatcaggattttttcttctcgcggctatgcaggccacgcttctccagaccacggtaaatcagctgctgctgaataatggttaccaggttgctgacgatgtagtacaccaccagaccagacgggaaccacaggaagaacaccgtgaagatgaccggcataaaggtcatgatcttctgctgcatcgggtcggtcacggtggtcggcgacatcttctggatgaagaacatggtcgcgcccatgatgatcggcaggatgtagtacgggtcttgcgcggacaggtcatggatccacaggataaacggcgcatgacgcagttcaaccgaggcgctcagcatgtagtacagcgcaaggaagattggcatctgaataatcagcgggaagcagccacccagcgggttaactttttctgctttatacagcgccatcatttcctggctttgacgttgtttatcgtcgcccagacgctcgcgcattgcctgaatcttcggctgcagcatacgcatcttcgccatggaggtgtactgcgctttagtcagcgggtacatgatgccacgaacgataaaggtgatgacgataatcgagaagccccagttgccgaggaagccgtggatgaatttcagcagcttaaacagcggttgggagatgaaccacagccagccgtagtctacggtcagatccaggtgcggcgcgacggcagccattttatcctgcagagccgggccgacccacagcacgctttccagcttgtcggtttgacctggctgcaccagtaccggctgtgatttatagccgatagcgacaacgccattaccgaggttagcggtatagaagttgttggtgccgttgttatgcggaacccacgcggtggtgaagtactgctgcaacatcgccacccaaccgtctttggtgctgacgttcaggttttcgttgtcgacgatagtatcgaatttatatttttcgtatttcgaatcagcagtggagtacgccgcgccacggaaggtgtgcatggtagacagaccaccggtttgcgtatcgcggcttgatggtagcgctgccgtttgcttcagctgaccgaaggaggagatctccagcggtttttcgccgacgtttttcacgttgtagccaacgttcaccgcataatcaccgcgtttcagggtgaaagttttggtgaagacgttgcccgctttgtcggtgtaggtcagcggaataacgatttcgttctggccgtcagccagtacatacgcatctttatcagcgttatatagcggacgcgggccgttagccgggttatccgggccgtcacgaccggttaagccgctctgtgcctgatagataaactgtggcgtggtttccagtaactggaacggttcagtagatttcagcgctttcgggtaagccggaagcagcgcttgctcaacatcaccaccgctggtgttgatggtcagatcaagcacatcagttttaaccgtaatcagtttcccctggccactggccggtacgccctggtctgcggcgctacccgctgctgtggtcgtagtctgcgtggtctgctgctgggtttgcggatttttgtcctgctcccaggcttgccagatcatgaaagacacgaacaacaaagcgatgataagaagattgcgttgcgaatccatcgttagtgttctctggtatcaaatggtccaggcgggacggggtcgtcaccaccagggtgtaaagggtggcattttaatacgcgtttcaccgtcaaccaactgccttttatcactccaaacctgcgcaatgcctcaattccgtattgagaacaggttggcgtgaaacgacagtgcggcccgagtagcggactaatcaggcgctgatagaccctgataaggcctatcaggacccgcgagccaggcgacaatggcggcgccataatttttccaacgcttccgagagagcacggttatcgaggtcggcaacccctttctttgccaccaccacgaaatccattggcgggagttcatgttgacgtaaacggaagctttcacgcgtcagacgtttaatccgattgcgttcatgcgcgcgcttaacgtttttcttggcgacggtaagaccgatgcggggatgccccagcgaattcaggcggccgaggatggtgatttgcggcgtgccagcccgttgtggctgctggaagacgaaagtgaaatgactgggagttaacaaacgtaactccctgggaaatgctagcttaaccacgcagggttagctttattacttggaaacggtcagacgagcgcggcctttagcacgacgacgtgccagaacctgacgaccatttttattagccatacgagcacggaagccgtgagaacggttgcgcttcagtacagacggttgaaaagtgcgtttcatggcgatttctacctaaacttgaataaattcactgacttttgcgtagacccgaacgaacttcgaacgacttacgcctcagcgtgggtgattaaagaggccggattgtaataattgtacactccggagtcaattctctttccttatttctcgcaccttgccgcacaaaaaataagctgagacgagttgcgaaaacgggcgttacgcgccgggtgggggattatacggcctggcgggtaaagcgcaaggatcgtaaaggatctttgttagatcaattctgttcaaaaccggcatagctcattaatttttccaatatgcgggcgaaatcgtgccgcactctcgccaggatcgattacacttacccggtttcgatcctcctgtggataaatcgggaagaatctgttgagaaacacaagatctctttttcagtttaggttatgatccccggtcccgatcgcgatccacggatccgtcccgggtaaaaccgcaaatagcggttcgcacgtcaccccttttgcgcaggggctttttcggctaatgcagggtcttgcgacgtgtgccaacaatcacgattgtttcagtttttcttttatatcgattttatgttcgagtggagtccgccgtgtcactttcgctttggcagcagtgtcttgcccgattgcaggatgagttaccagccacagaattcttgcatgtggatccgcccattgcaggcggaactgagcgataacacgctggcactgtatgcgccaaaccgttttgtgctcgattgggtaagggacaaatacctcaataatatcaatgggctcctcaatgacttttgtggtgcggacgccccacagctgcgctttgaagtgggcgcgaagcctgcggcgccgtcccaccaggggacggccaacgtcgccacggcgatcccggccgctcaggtgcaaaccgcgcgcgtcgcgccggctgtcgcccgtcagggctgggataacgttccggcgccggcagagcccacctaccgttccaacgtcaacgtcaagcatacgtttgataacttcgtcgaaggtaaatctaaccagctggcacgcgcggcggcgcgtcaggtggccgataacccgggcggcgcgtataacccgctgttcctttatggcggcaccggtctgggtaaaacccacctgttgcacgccgtcggcaacggcattgtggcgcgtaagccaaatgctaaagtggtttatatgcactccgagcgtttcgtgcaggacatggttaaagccctgcaaaacaacgccatcgaagaatttaaacgctattaccgctccgttgacgccctgctgatcgatgatattcagttcttcgccaataaagagcgttcgcaggaagagttcttccacaccttcaatgccttgctggaaggtaatcagcagatcatcctcacttcggatcgttatccaaaagagatcaacggcgttgaggatcgtctgaaatcgcgctttggctggggcctgacggtggcgatcgagccgcctgaactggaaacccgcgtcgcgatcctgatgaagaaagccgatgagaacgatatccgcctgccgggcgaagtcgcgttctttatcgctaagcgtctgcgttcgaacgtgcgtgagctggaaggggcgctgaaccgcgtcattgctaacgccaactttaccggccgggcgatcaccatcgatttcgtgcgcgaagcgctgcgcgatttactggcgctgcaggaaaaattagtcaccatcgacaatattcaaaagacggtggcggagtattacaagattaaggtagcggacctgctgtccaaacgccgctctcgttcggtggcgcgcccacgccagatggcgatggcgctggccaaagagctgaccaaccacagcctgccggaaatcggcgatgcgtttggcggccgcgaccataccaccgtgctgcacgcctgccgtaagattgagcagttgcgtgaagaaagccacgatattaaagaagatttttccaatttaatcagaacattatcctcgtgacgctatgaaatttaccgtagaacgtgaacatttattaaaaccgctgcaacaggtgagcggtccgttaggtggtcgtccgacactgccaattctcggtaacctgctgcttcaggtcgcggacggcacgctgtcgctaaccggtaccgatctggaaatggaaatggtcgcgcgcgtgtcgctgattcagccgcacgaagcgggcgccaccaccgttccggcgcgtaaattctttgatatctgccgcggcctgcctgaaggcgcggagatcgccgtgcagcttgaaggcgaccgtatgctggtgcgctccggccgcagccgcttctcgctgtcgaccctgcctgccgccgatttcccgaatctcgacgactggcagagcgaagtggaatttactctgccgcaggcgacgatgaagcgcctgattgaagccacccagttttcgatggcgcaccaggacgttcgttactacttaaacggcatgctgtttgaaaccgaaggtagcgaactgcgcactgtcgccaccgatggccaccgtctggcggtttgttcaatgccgttggaagagtcgctgccgaaccattcggtgatcgtgccgcgtaaaggggtgattgagctgatgcgtatgctcgacggcggcgatacgccgctgcgcgtgcagatcggcagcaacaatatccgcgctcacgtcggcgattttatcttcacctcgaagctggttgacggccgtttcccggactatcgccgcgtattgccgaaaaacccggataaacaccttgatgccggctgcgacattctcaagcaggcctttgcccgcgcggcaattctgtcgaacgagaaattccgcggcgtgcggttatacgtcagcgagaaccagctgaaaatcaccgcgaataacccggaacaggaagaggcggaagagattctcgatgtcacttattcgggcagcgagatggaaatcggctttaacgttagctacgtgctggatgtgctcaatgcgctgaaatgcgagaatgtgcgcatactgctgacggattccgtatcgagcgtgcagattgaggatgcggcttcgcaatccgcagcctatgttgtcatgcctatgagattgtagaatctgcaaaggggctggtttacttgccatttcgccttccggcagtgctcgaaatgctcacgtacttcgtgtacgctccgctttctgcgcgctggcggtagacgaactggctgcgacacccacgccccttgaatgatgacgagctgatatgtcgctatcccgactccttatcaaagatttccgcaatatcgaaaatgcggatctcgctttatcccccagctttaacttcctggttggcgcaaacggcagcggcaaaaccagcgtgctggaagctatctatacgctcggccatggcagggcgtttcgcagtttgcaaattggccgggtaattcgtcacgagcaggattcgtttgtcctgcacgggcgtttacagggcgaagagcgggaaaccgccatcggcctgaccaaagacaaacagggcgacagcaaagtgcgtatcgacggcaccgatggccacaaggtggcggaactggcgcacctgatgccgatgcagctgatcacgccggaggggtttactttactcaacggcggccccaaatacagaagagcgttccttgattggggatgctttcataacgaagccggattcttcaccgcctggagcaacctgaagcgcctgctgaaacagcgcaacgccgcgctgcgccaggtgagccgctatgcgcaactgcggccgtgggacctggaattaatcccgctggcggaacaaatcagccgctggcgtgccgaatacagcgccgctattgtcgaagacatggcggatacctgtcagcaatttttaccggaattcaccctcaccttctctttccagcgcggctgggaaaaagaaacggactacgccgaggtgctggagcggaatttcgaacgcgacagaatgttaacctacaccgctcacggtccgcataaagcggattttcgcattcgcgccgatggggcgccggtggaagacaccttgtcgcgcgggcagcttaagctgctgatgtgcgccctacgactggcgcagggcgagttcctgacccgcgaaagcgggcggcgctgcctgtacctgatagatgattttgcctcggagcttgacgatgcccggcgcgggctgcttgccagccgcttaaaagccacgcaatcgcaggttttcgtcagcgcaatcagcgctgaacacgtaatggacatgtcggacaaaaattcgaagatgttcaccgtggaaaagggtaaaataacggattaacccaagattaaatgagcgagaaacgttgatgtcgaattcttatgactcctccagtatcaaagtcctgaaagggctggatgcggtgcgtaagcgcccgggtatgtatatcggcgacacggatgacggcaccggtctgcaccacatggtattcgaggttgtggataacgctatcgacgaagcgctcgcaggttactgtaaagacatcgttgttactatccacagcgataactccgtctccgtacaggatgacggccgcggcatcccaaccggcattcacccggaagagggcgtctccgcggcggaagttatcatgaccgtcctgcacgccggcggtaaattcgatgataactcctataaagtgtccggcggtctgcacggcgtaggcgtctcggtggttaacgccctgtcgcagaagctggagctggttatccaacgcgataacaaagttcacaaacaaatttatgagcacggtgtgccgcaggcgccgctggcggtaaccggtgaaaccgaaagcaccggtaccatggtgcgtttctggccaagcctggaaacctttaccaacgtcactgaattcgaatacgaaatcctggcgaaacgtctgcgcgagctgtcgttcctcaactccggggtctctatccgcctgcgcgataagcgcgacggcaaagaagaccatttccactacgaaggcggcatcaaggcgtttgttgagtatctcaacaagaacaaaacgccgatccacccgaatatcttctatttctccaccgaaaaagacggtattggcgttgaagtggcgctgcagtggaacgatggtttccaggaaaacatctactgctttaccaacaacattccgcagcgcgacggcggtactcacctggcgggcttccgcgcggcgatgacccgtaccctgaacgcctacatggataaagaaggctacagcaaaaaggcgaaagtcagcgctaccggcgacgatgcgcgtgaaggcctgattgccgtggtttccgtgaaggtgccggatccgaagttctcctctcagaccaaagacaagctggtctcctccgaggtgaaatcggcggttgaacagcagatgaacgaactgctgagcgaatacctgctggaaaacccgtccgatgcgaaaatcgtggtcggcaaaattatcgatgccgcgcgtgcgcgtgaagccgcgcgtcgcgcccgtgaaatgacccgtcgtaaaggcgcgctggacctggcaggcctgccgggcaaactggcggattgccaggaacgcgacccggcgctgtctgaactgtacctcgtggaaggggactccgcgggcggctctgctaaacagggccgtaaccgtaagaatcaggctatcctgccgctgaagggtaaaatccttaacgtcgagaaagcccgcttcgataaaatgctctcttctcaggacgtggccacgctgattaccgcgctgggctgcggcatcggccgcgatgagtacaacccggataaactgcgttatcacagcatcatcatcatgaccgatgcggacgtcgacggctcgcacattcgtaccctgctgttgaccttcttctatcgtcagatgccggaaatcgttgaacgcggccacgtttacattgctcagccgccgctgtacaaagtgaagaaaggcaagcaggaacagtacattaaagacgacgaagcgatggatcagtaccagatctccatcgcactcgacggcgcgaccctgcacaccaacgccagcgcaccggccttagccggcgagtcactggaaaaactggtggccgagtacaacgcgacgcagaaaatgattggccgcatggagcgccgtttcccgaaagcgatgctcaaagagcttatctatcagccgacgctggccgaagccgatctgagcaacgagcagaccgtcacccgctggattaaccagctgatcagcgagctgaacgaaaaagagcagcacggcagccagtggaagtttgatattcgtgaaaacagcgagctgcagcagttcgagcctatcgtgcgcgtgcgtactcacggcgtcgatactgactacccgttggataacgagttcatcaccggcgcggaatatcgccgcatctgcaccctcggcgagaagctgcgtgggcttatcgaagacgacgcgttcatcgaacgcggcgagcgccgccagccggtagccagcttcgaacaggcgctcgactggctggttaaagagtcgcgtcgcggcctctctatccagcgttataaaggtctgggcgagatgaacccggatcagctgtgggaaaccaccatggatccggatagccgccgcatgctgcgcgtcaccgtgaaggatgcgattgccgccgaccagctgttcaccaccctgatgggcgatgccgttgaaccgcgtcgcgcctttatcgaagagaacgccctgaaagcggcgaacatcgatatctaagcctgtatttccccggcgacataatgtctaccggggccacggctttgctaaacccggtatgcgttacgctgccgggtttttcttttgcggcaaaagaggaatcctcccacgcaatccatcctcgttttctcccgttgcgagagctgttttttgagcggaatcgcgttagcatgagtgaagactcatcttacccggggatcccatggctattaaactgattgcaattgatatggacggcacgctgttgctgccggaccataccatttctccggcggtgaaaaccgccatcgcggcagcgcgcgcccgcggcgttaacgtggtgctgacgactggccgcccttacgctggtgttcatagctacctgaaagagttgcacatggaacagccgggcgactactgcatcacctataacggtgcgctggttcagaaagccagcgacggcagcaccgtggcgcaaacggcgttaagctacgatgattatcgcttccttgagcaactctctcgcgacgtcggctcgcatttccacgcgctcgatcgtaatacgctttacaccgcgaaccgcgatatcagctactacacggtgcatgaatcctacgtggcgaccattccgctggtattctgcgaagcagaaaagatggaccgtaatattcagctgctgaaggtgatgatgatcgatgagcctgccgttctcgatcgggccatcgctcgtattccggcggaagtgaaagagaagtataccgtgctgaaaagcgcgccgtacttcctcgaaatcctcgataaacgcgtcaataaaggcaccggcgtgaagtcgctggccgatacgctgggtattaagccggaagaaattatggcgattggcgatcaggaaaacgatattgcgatgattgaatttgccggcgtcggcgtggcgatggataacgctatcccgaccgttaaagaagcggcgaatttcgtcaccaaatcgaaccttgaagatggcgtagccttcgccattgaaaaatacgttttagcctaagcgcatttcgggcccggaattctccgggcctcagactgctgacaaagaaggaaaaagcgtggtttttccttctttgtggttatcagccgaaaatcaataaattgattttccatgttttttgtctggtgcaatttgtaagtgcaacggttgcatgaggtttgtcatcaatctcaggcccggaattctccgggcctgtcttctcttttttcatgaatagatgttaatccgcatttaaatcccttaatcagcgcaggggattctataagctaccagcccccttttaacaatacgttaataactaacatcatattcctatgaataaaaatcactttttgatgttggttgcgctgcctttttcctcttttcaggcctgcgcggccgcagaaccaacaacccaacttgaacccgtatacgcctggcacggtagcgaaccggcggatctgcccgcgcctgacaatagccaggccgcggcgccggagtcgacatcggtattgccttttttaggcgatgaagccagaaagcacggctatgtcctaccgctgccttttggtgtcggcgttaactacatggatatgcggcagaatattaatgtcgatagcattaattttaccggtttatcgttaggtaatttttcactggataacgccttccagattggcgtcggtaatacgcgagaaagtagcaaaaccgagacgcttaagctggatgcctggctgctgccgtttatgaacgtctatggcctggttggacatactaaaggccattctatctcgcaaattgccgtcggcctgaaagggccgaatggcaaagtggtgcccatgccaggtatgcagaatcttgattttcgccttgattttaaaggcactacctacggcgtcggtaccacgctggtgggcggcgttggcaactggttcacggttttagacgccaactatacgcagacgcgttttgatatcctcgacggcagcattgatgcttttaccttttcgccgcgtttgggctatcgtttcaatacgccgtcggtagatgcgctgcatctgccgaacgggaagctgaatgtctgggtcggcagcatgtatcaggatgtgcagcaagaatttaagggcagcctgaacgatctgtcgatgccgtcgacgatgctgcaaaacatggtcaatctggccaataagaacggtgatggccgctttgatgtgaaacagcatctgcagtcgccgtggaacgtgctggtgggcgcgcagtatgagatgacccggaattttaatatcactacggagtttggttttgccgaacgtaatagtttctttatcgccggcgagtatcgcttttgagccgaccgtttaaccctatcctgctgttgataacctgccttgttattgggcaggcgcaggcacaggcgctcagccgcgaaaaaatcgacggctggttgcaaaaccttggcgccagcgacaagtttgacgccagcaaaggcatcgactggggcgtcatgccggggccattttatacgccggagctggggcttggattgggtacggctgtcgtgggcatgtatcgcccggacccaaatgacaccatcagccagaactccacgctgacgcttagcggctacgtcagctcgacaggcgcgtttggcctcagcgttaaaaactatgcctttttcgacaacgatttgtggcggatatttgttgaaggctcgatggccaacacaccgacttactactggggacaaggttttcacgccggcgacaaagacaatgagaaagaaaaatataccgcccaggtgctgacattgcgcccgatgctctaccggcagctcatcgataatgtttatctgggggcggggtggtcgttggcggcgcaaaatgccgatgagatggaccatgacgatctgccgaaaatagaaaacaccccgcaggggccgtcggtattcagctccggcgccagtattgatatcaactgggacgatcgcgattttgtccccaacccacgcaagggccaatacgccgattttcgctatacccactatgcgccgggacttggcagcgacacgcgatttgatgaatttcgcctgcactatagccgctatcaggccctgagcgataaaagcgtgctggcctgggaagcggatggcacatttactcagggcgatgttccgtggagcatgatgccgctgctcggtagcgatgagcgtatgcgcggctactaccaggggcgctaccgcgataaaaacgtggtcagctctcagctggaatatcgtcgtcagttgacgtggcgacacggcgttgttgtctgggtcggcgcgggcaccatggggtcatctattgattccctgaatgacggacgctggctaccttcggcaggcgtcggctaccgctttgaattcaaacctcgcgttaatattcgcctcgactacggtgtcggcaagggcagcagcggcttttacttccaggtcggcgaagcgttctaactctttttaccctccttccttactttgacggcgccatctgtcgtgggcacaggcatttttatttttatgggttgttctttttgtgatctaaattgtagtacaacacaatcatgttgtactacattgtgctcatggcgacgacgcctgacatcacgctagtagtacaaaagtgaggcgaaattcgacagcgacggtaaagtagagcagtacacatagagcataaggactctccatgactctcaataagaccgatcgcatcgtgatcacgctgggcaaacagattgtcagcggtaagtacgtaccgggttcagcgctaccagccgaagcggaactgtgtgaagagtttgaaacttcgcgcaacatcatccgcgaagtatttcgctcgctaatggcgaagcggctgatcgaaatgaagcgttaccgaggcgcatttgtcgctccgagaaaccagtggaactacctcgataccgaggtactgcagtgggtactggaaaatgattatgacccgcgtcttatcagcgcgatgagtgaagtgcgcaacctggtcgagcccgccattgcccgctgggcggcagagcgcgccacctcaagcgatctggcggaaatcgagtcggcgctcaatgacatgatcgccaacaaccaaaaccgggatgcctttaacgaggccgatattcgttaccacgaagcggtgctgcagtcagtacataacccggttttgcagcagcttagcgtggcgatcagttcgctgcagcgggcggtatttgaacggacctggatgggcgatgaaggcaacatgccgaaaaccctgcaggaacataaagcgctatttgacgccattcggcatcaggatagcgacgcggcggagcaggcggcgttgacgatgatcgccagctcgacacgaaggctcaaggaaatcacatgacggctcgctacatcgcaatagattggggatcgacgaatttacgcgcctggctttatcagggcgaagaatgcctggaaagcaggcaatctgaagcaggcgtaacgcgcctgaacggtcgctctcccgctgcggtgttagcggaaattacccaacactggcgtgatggcgccacaccggtggtgatggcagggatggtcggcagcaacgtgggctggaaaatagccccctatttgccgcttcctgccgctttctcggacattggccagcagttaactgccgttggcgacaatatctggataattcccggtctttgcgtttcccgtgacgataaccataacgtcatgcgcggagaagaaacgcaactgctgggcgcacgcgccttagccccttcatctgtctacgtgatgccgggaacccactgcaaatgggtactggccgatcgcctgcaaattcacgattttcgtaccgttttgaccggtgagttgcatcatctgttgcttcagcactcgctggtgggcgccggcttaccgccgcaggagacgtccaccgacgcattcgcggccggtctgcagcgcggtatcaacaaccccgccgtcctgccgcagctgtttgaagttcgcgcttcgcacgtgctgggcgcgctgcctcgcgagcaggttagcgaatttctttccggcctgctgattggcgctgaagttgccaccctcagcgacacgttcgccggacagcaggcgatcggcctcgtcgccggatcatcgttaacgtcccgctatcagcaggcattcgccgccattggccgcgaagtcaccgcggttgcgggcgatacggcatttcagacaggaataaggagcatcgcttatgcagtggcaaactaaccttccgcttatcgctatcctgcgcggcattacgtcagacgaggcgctggctcacgttggcgccgttatcgatgccggtttcgacgcggtcgaaatcccgctgaactcgccgcagtgggagaaaagtattccgcaggtcgtcgatgcttacggcgagcaggcgcttatcggcgcgggcaccgtgctgcaaccggagcaggtcgacaggctggcggccatgggctgtcggctgattgtgacgccaaacattcaaccggaagtgatccggcgagcggtgggttacggcatgactgtgtgcccaggctgcgccaccgccagcgaagcctttagcgcgctcgatgccggcgcgcaggcgctgaaaatcttcccgtcatcggcttttggaccggattacatcaaagcgttgaaagccgtgttgccgccggaggttccggtctttgccgttggcggcgtgacgccggaaaacctggcgcagtggattaatgccggttgtgtgggggctgggctgggtagcgatctctatcgcgccggccagccggttgaacgtaccgcgcaacaggcagccgtattcgtaaaagcatatcgagaggcagtgaaatgaaaataaccaatatcaccacgtaccgtttacctccgcgttggatgttcctgaagattgaaaccgatgaaggcattgtcggctggggcgaaccggtgattgaagggcgcgcccgcacggtggaggcggccgttcatgaatttggcgactacctgattggccaggatccggcgcggattaacgacctgtggcaggtgatgtaccgcggcggcttttatcgcggcggcccgattatgatgagcgccatcgccggtattgaccaggcgctatgggatattaaaggtaaggttctgaatgccccggtctggcaactgatgggcgggctggtgcgtgacaaaattaaagcctacagctgggtgggcggcgaccgccccgccgaagtaattgacgggattaagaagctgcgcggcattggtttcgacacctttaaattaaacggctgcgaagagatggagctcatcgataattcccgcgcggttgacgcggcggtgaataccgtagcgcaaatccgcgaagcgtttggcaatgaaattgagtttggtctcgattttcatggccgcgttagcgcgccgatggctaaggtattaattaaagagctggagccatatcgcccattatttattgaggaaccggtattagccgagcaggcggaatattatccgcggctggcggcgcaaacgcatattccaattgccgccggcgaacgtatgttctcgcgctttgaatttaaacgggtactggaagcgggcggggtggctattttacagcccgatttgtcgcacgcaggcggtattaccgaatgctataaaattgccggaatggcggaagcctatgacgttgggctggcgccgcactgcccgctggggccgatcgcgctggcggcttgtctgcacgtcgatttcgtttcacataacgcggtcttccaggagcagagcatggggatccactacaacaaaggcgccgaactgcttgattttgtgaaaaataaagaagatttcaatatggaaggcggcttctttaaacctctgatgaagccggggctgggcgtggaaattgatgaggcccgcgtggttgagttaagtaaaaatgcgccggactggcgaaatccgttgtggcggtatgaggatggatctgtcgccgaatggtaaatgctcttcatatttcacgccacaggtgcgttggctgcgattgcgcaccccagtcacttactaatgtaagctcctggggatttgcaatcttgccgccttcctgcgacgtgaactatttagagcattcgtaagtaaaaaataaaaaacaaaaacaccctctgtaaattaccgggcatggtgagcggcttcgctatgcccaaaatctggagacagattgcgatggatatttcagttaccgctgtaaaaaccgggcgtcgccgttatctgacgctcatcatgatctttattaccgtggttatttgttatgttgaccgcgccaacctcgccgtcgcctcggcgcatattcaggaggagtttggtattagcaaagcggaaatgggctacgtattttccgcctttgcctggctgtataccctctgtcagatccctggcggttggttccttgaccgcgtgggatcccggcttacctactttatcgctatatttggctggtccgtggcgacgttgttacaaggcttcgccaccggcttaatgtcgcttatcggtttacgcgccattaccggcatcttcgaagcgccagccttcccgaccaataaccgcatggtgaccagctggttcccggagcacgaacgcgcctctgccgtcgggttttatacctcggggcaatttgtgggcctggccttcctcacgccgctactgatctggatccaggagctattaagctggcattgggtatttatcgttaccggcgggatcggcattatctggtcgttaatctggtttaaggtttatcaaccgccgcgcctgactaaaagcatcagcaaagccgagctcgactatatccgcgacggcggcggcctggtggatggcgatgcgccgctgaagaaagaggcgcgtcaaccgttatcaaaagcggactggaagctggtctttcaccgtaagctggttggcgtttaccttgggcagttcgcggttacctcgacgctgtggttcttcctgacctggttcccgaactacctaacccaggaaaaaggcatcaccgcgctgaaggccggttttatgaccacggtgcccttcctcgccgcgttttttggcgtcctgctctccggctggctggcggataagctggtgaaaaaaggttactcgctgggcgtagcgcgcaaaacgccgattatctgcgggctgctgatctccacctgcatcatgggggcgaactataccaacgaccctgtgtggatcatggcgctgatggcgctggcattcttcggcaacggctttgcgtctatcacctggtcgctggtctcctccctggcgccgatgcgcctgatcggcctgaccggcggggtgtttaactttgttggcggactgggtggtatcaccgtaccgctggtgattggttatctggcgcaggattatggctttggcccggcactggtttatatctccgtggtggcgctgatcggcgcgctgtcttatatcctgctggtcggcgatgtgaaacgtgtaggctaaattttggcgatacgctaccctgatgcgtaagtctcgcatcagggtatcgtcatgaaacaagtcacttttgctccccgtcaccatcagcttaccaatatcaatacctggaccccggacagccagtggctggttttcgacgtccgcccgtcgggggcctctttcaccggcgagaccattgagcgggtgaatatccatagcggcgccgttgagacgctctatcgcgccgctgacggcgcctgcgttggcgtggtcaccgtacacccgacgcaagataaatacgtttttattcacggccctgaacacccggatgccaactggcattacgattttcatcaccgccgcggggtggtgagctggcagggtgaaacccgcaatcttgatgcgctggatattaccgcgccttatacccccggcgcgctgcgcggcggcagccatgttcatgtcttcagccctgacggccagtttgttagcttcacctataacgaccacgtactgcacgagtacgatccggcgctggatctgcgcaacgttggcgtggccgcgccctatggcccggtgagcccgcagggcacgcatccccgtgaatatgccggcagccactggtgcgtgctggtgagccgtaccacggcgaacccattaccgggcagcgatgagatcaatcgcgcctatgaagagggatgggtgggtaatcatgccctggcgttcattggcgatacgttggcggaaaacggcgacaaagtgcctgaactgtttatggtgacgctgccgtgggatgaggcgggctggaagcggcagggcgatatgccgctggccggtacagcaacgacgctgcccgcgccgccggcaggcataagccagcgccgcttgacctttacccaccagcgccgctatccggggctggtgaatgtaccgcgccattgggtacgcgccaatccgcaggccaccgagatcgcctttctgatgcgtgatgacgcaggcgttgtacagctgtggcttatcccgcctgcgggcggcgagccgcgccagctgacacatacggtaacgggcatccagtcagcatttaactggcatccgtcgggcgcgtggctgggatgtgtggtggaaaacaaaatcgcgctctgcgatgcccgcagcggcgcggtaagttatttgacgaccgatcgcgaaaatccgccgtccgcggatgccgtcgtattttcaccggatggcaaatacctggcgtggatggaagacgtcgacggttatcgccagttgtggataaccgaaacgcagcgctagcttagcgcgaaggcattggcgctggcgggatgacggagttggtcgccagcgtctcctgctcgcttttttcgacgcgcgatttgaccgagctatcggtgcggaataaatcccacggcagcagtagcgtgtccatgaccgcggtgaacggcatatcgagggccaccagcgatttcacgccccagttagtgtcgtcatcgcccagcgtatgggcgctggagcgcgtgcctgggtaggttccttccttgccgccggtatgcgacatcacgctggagcaaccgcccaaactaatcatcccgctgaacaggaccagctttaacaatccgcttttcatcactcttccgtcattttatcggggttacttcggttataacgagccgtcccgtgaatgcctagcgttattgcactgcactgtggcgagtatcgcactttgccttttgtgctttgcaaccagtctaagcattcgccagcaaactgcaaaaaaatttggccgaaaaggccttgaaaagcgtcggggcacacccattttagtagtgtcacccaatgaggatacgcctgaggggtattccgggtcataacggcttgtccatgatggaaagccattgaattctcgctgatttcaggagctatttactatgcgtaatttcgatctctccccgctttatcgttctgctattggtttcgaccgtctgttcaacctgttagaaaataatcaaaaccagggcaacggcggctaccctccgtataacgttgaattagtagatgaaaacaattaccgcatcgcgattgccgtcgccggttttgcggaaagcgaattagagataaccgcgcaagacaatcttctggtggtgaaaggctcccatgccgccgagcagaaagagcgcacctacctgtaccagggtatcgcggagcgcaacttcgagcgtaaattccagctcgccgataacattcatattcgcggcgcgaacctggtcaacggcctgctgtatatcgatctggaacgtgtgattccggaagcgaacaaaccgcgccgtatcgaaattaactaatcgtcctcttcaggccgcgcggcggcctgaatatacaacttgctcgccgtcagggagcaaatgcgaattcgctgaattcgcaggtacctactcgcttctcagaaggagaaaacacgatgcgtaactacgatttatccccactgctgcgtcaatggatcggttttgacaaactggctaacgccctgcaaaccgccggtgaaagccaaaccttcccgccctataacatcgaaaaaagcgacgataaccattaccgcattaccctcgcggtagccgggttccgtcaggaagatttggatattcagctggaaggtacgcgtctgaccgttaaaggcacgccgcaggccgctgaaaaagagaccaaatggttgcaccaggggctggtgaatcaggccttcagcctgagtttcaccctcgcggacaatatggaagtctccggcgccacctttaccaatggcttattgcatatcgacttaacccgccacgagccggaagtcgcggccccgcagcgtatcgccattagcgagcgcccggcactgaatagttaattaagccacatcgctttcaagccccgataactcggggcttttttgtgcgcgggactacatacagtattcccgccttcagtcataatccctgttaataataatgttattcacagggaaaatagtatgagtgatatagcattgaccgtcagcgtgttggcgctggttgcggtggtgggattgtggatcggtaatgtcaaaatccgcggcgttggatttggtatcggcggcgtgctgtttggcggcattatcgtgggccactttgtggatcaggcagggattacgctgagcagcccgatgctgcattttatccaggaattcggcctcattctcttcgtctataccatcggtattcaggtcggtccgggcttttttgcctcgttacgcgtctccggacttaagctcaatctgttcgccattcttatcgtcgtacttggcgggctggtgacggcgatcctgcataaactgttcagtattccgctgccggtggtgcttggtatcttctccggtgcggtcactaatacccccgcgcttggcgccgggcagcaaatcctgcgcgatcttggcctaccgtttgatgtcgtcgatcagatggggatgagttacgcgatggcctacccgtttggtatctgcggcattttgctgaccatgtggctggtgcggctgttctttcgcattaatgtggaaaaagaggcgcagcagtttgatgagagcagcggcaacgggcacgctcatctgcataccattaacgtgcgggtggagaacccgaacctgaataatatggcgattcaggatgtgccaatgctcaacagcgacaaaattatctgctcgcggttgaagcgcgatgagctattgatggtgccggcgccgggtacgcttatccagcatggcgatctgctgcacctggtcgggcggccggaagatttacacaatgcgcagctggtgattggtaaagaggtggcgacctcgctctcaacgcgcggaaccgatctcaaagtggaacgcgtggtggtcactaacgagaaggtcttagggaagaaaatccgcgatctgcactttaaacaacgctatgacgtcgtgatctcgcggcttaatcgcgccggggtggagctggtggccagcagccatgccagcctgcagtttggcgacattcttaacttagttgggcgtccacaggccattgacgcggtggccaatgaactcggcaacgcacagcaaaagctgcagcaggtacaaatgctaccggtgtttatcggtattggtctcggggtgctgctggggtctattccgctgtttattcccggttttccggcggcgttgaaactggggctggccggcgggccgctgattatggcgctgatcctcgggcgtatcggcagcatcggcaagctgtactggtttatgccgccgagcgctaacctggcgctgcgcgaactcggtatcgtgctgtttctggcggtggtggggctgaagtccggcggcgattttgtcgacaccctgctccacggcgaggggctcagctggatagcctacggtattttcatcaccgctatcccgctgctgacggtgggcatactggcgcggatgctggcgaagatgaactatctgaccctctgcggcatgctggccggctcaatgaccgacccgccggcgctggccttcgccaacaacctgcacgccaccagcggcgcggcggcgctctcctacgccacggtttatccgctggtgatgttcctgcggataatcacccctcagctactggccgtgctgttctgggggctgagttagcgggctctgtgcctggacccggcgcaggtggtaatccacctgatactcgctggcgttgcggaacatcacggaatagttaagaaactcgccgctatcgctgtaggaaagcgaggtaatgcgcagcagcggcgtctgttccggcacgttcattgagcgggccaactgtttatccgccagtaccggggtgagggtttcatagttgccgctgatggtaataccgcattctttctcgatatagtcgaacttcgacccctccagatgacccaacgacagatggcggaacagtttaaccggcatataactgtcctccagcattagcggtttaccatcgacgtagcgcacccggcgtgagaaatagatccgttcatcaattttaattcgcagctgactggcgatagccggcggcgcgggcatcacttcgaatatcaacacctgactcaccacttctttaccctgctggcgcagaacttccgccagcccggtcaggttgctggtctcatggtgtacatctttgcgcgcgacataggtgccggagccgtggcggcgcaccactaatccactttccaccagcaggtcaatggctttgcgaatcgtcatgcgcgccacgccgaactcctgcgccagttttttctcgcccggtaacgggctgccaatgttgaaatcggaagagttgagccgtaaacgcagtttgtcagcaatagatttgtagatcactagtagacctctattcgtcattgatgaatcagcgatggccagctgacgtgaattataaaattataaaaaacaataaattaaaaactatagatgacgttgatttcgtcacctccattcatcgtgtctatgttttacgcaaaaagtagacaacattgaccgaattaaaaccatgaatgcgatcacgaatcgcagcggcgcagcatgttgccgacggggcgaattcctatgctcgaagcaggccggtaaagaacaaaaaaaggccacttaccctacgagttgttacatgaggattttcaaatgctcagtcaaatacaacgctttggcggcgccatgtttaccccggttttgctgttcccattcgccgggattgtggtgggtatcgctattatgctgcgtaatccgatgtttgtcggcgaagcgctcaccgcacccgatagcctgttcgcgcaaattgttcacatcattgaagagggcggctggaccgtctttcgtaatatgccgctgattttcgccgtcggcctgccgattggcctggcgaagcaggcccagggccgggcctgcctggcggtactggtcagttttcttacctggaactacttcatcaacgccatggggatgacctggggccacttcttcggcgttgatttcaccctggatcccacggcgggaagcggcctgacgatgattgccgggattaaaaccctggataccagcattatcggggccatcgttatctccggcatcgtcaccgcgctgcacaatcgttacttcgataaaccgctgccggtgttcctcggtatttttcagggatcgtcgttcgtggtgatagttgcttttctcgcgatgatcccttgtgcctggctaacgctgctcggctggccgaaggtacagatggggattgagtcgctgcaggctttcctgcgctcagccggcgcgctcggggtgtgggtttacatctttcttgagcgcattttgatcccgaccggcctgcatcactttgtctatgggccatttatctttgggccggcggtagtggaaggcggcatccaggtctactgggcgcagcatctgcaggaatttagccagagcgttgaaccgttgaaaacgctgttccctgagggcggttttgcgctgcatggcaattcgaaagtctttggttcggtgggtattgcgctggcgctttacttcaccgccgcgccgcaaaaccgggtgaaggtcgctggtttgctgatccccgccaccctgaccgcggtgctggtgggcattaccgagccactcgagtttaccttcttgtttatctcaccgctgctatttgccgtgcatgcgctgctggcggccaccatggcgacggtgatgtatatctgcggcgtcgtggggaacttcggcggcggcctgctcgatcagttcctgccgcaaaactggatcccgatgttccatcaccacgcgtcgatgatgtttatccagataggcatcggcgtctgctttaccggcatctacttcgtcatctttcgcaccctgatcctgcgcctgaacctgaaaacgccgggtcgcgaagacagcgaaatcaagctttacagcaaagcggattatcaggaggcgcgcggtaaaaccagcgtggcggcagctgcggaaaacaagctgggtcaggccgccggctttctgcaggcgctgggcggggccggcaatattgaaagcatcaataactgcgccacccgactgcgtattgcgctggtggatatggcgaaaacgcaaagcgacgaggtgtttaaagcactcggcgctcacggcgtggtccgccgcggcaacggcattcaggtcattgttggtctgcatgtcccgcaggttcgcgaccagctggaaaccttaatgaaagattctttatcgaccgaacacaccaccatgacggaggcagtatcatgaaaaaattctcagttgttatcgcaggcggcggcagtacctttacccctggcatcgttttaatgctgttggcaaaccgcgatcgtttcccgctgcgggcgctaaaattttatgacaacgacggcgcgcgtcaggagactatcgccgaagcctgtaaaattatcctcaaagaacaggcgccagagattgagttcagctacaccaccgacccgcaggtcgcctttagcgatgtcgacttcgtgatggcgcacatccgcgtcggcaaatacccgatgcgcgagcaagatgaaaaaataccgctgcgccacggcgtgttgggtcaggaaacctgcggaccgggcgggattgcctatggtatgcgctctatcggcggcgtgctggagttggtggattatatggagaaatattcgccaaacgcctggatgctcaactactccaacccggcggcgatagtggctgaagccacccgccgcctgcgacctaatgcaaaaattctcaatatttgcgatatgccgatcggcattgaagggcggatggcgcaaatcgtcgggttgaaagaccgcaaacagatgcgcgtgcgttactacggccttaatcacttcggctggtggacctcgattgaagatctcgatggcaacgatttgatgccgaaattgcgcgagtatgtggcgaaatacggctatgtaccgccatcgaacgacccgcacaccgaagccagctggaacgatacgtttgccaaagcgaaagatgtacaggcgctggatccgcaaacgatgccaaacacttacctgaaatattatctgttcccggattacgtggtcgcgcactccaacccggagcgtacccgcgcgaatgaggtaatggatcatcgggagaaaaacgtctttagcgcctgccgggcgattattgccgccggtaaatcttccgcgggcgatctggagatcgacgaacacgcgtcgtatatcgtcgatttagcgacggctatcgcctttaacactcaggaacgaatgttgttgattgtgccgaacaatggcgcaatccataactttgatgccgacgcgatggtagagatcccttgtctggtcggtcataacggaccggagccgttgacggtgggcgatattccgcatttccagaaagggatgatgagccagcaggtggcggtggaaaaactggtggtggatgcgtgggagcagcgttcatatcacaagctgtggcaggcgattacgctatcgaaaaccgtaccgagcgcctcggtggcgaaagcgatcctcgatgacctgattgccgccaataaagcgtactggcctgagctgcattaaccctcgttttaccggcatccatcgggtgccggttcttctctcctgttcgtgatttaggctatgctgtggcctgtttgcctgacgaacaaggactgctgatgaaaatttcccgcattggtgaagcgccggattaccgcttttcgctggccaatgaacgcacctttctggcgtggatccgtacggcgctcggctttctcgccgcgggcgtcgggctcgatcagctggcgccggattttgccactccgcttattcgcgaagtgctggcactgctgctgtgcctgtttgccggcgggctggcggtgtatggctatctgcgctggttgagtaacgaaaaggcgatgcgcctgaagcaggatcttccctatacccgtacgctgctggtgattagcgtcctgctgctggcggtcgtggcggcggtgatgctgctggtgctgtatggcggataaacgccgggcgcggcgggagaacgatcccggtttacagccggagcgcacctcgctggcgtggttccgtactctgcttggctacggggcgctgatggcgctggcgatcaaacataactggcatagcgccgggctggcgttctggatatcgattggcgtactggctgtggtggcgatcgttctctggcgctacacccgcagccgccatttaatggatgttgccgagagcgattttttgcagccgggagcagttcgtgacaaatttttgatctccctcgcagtgctttcgctgtcattattgtttgctgtaacgcatctacggcagatcattttatttcttaaggatgtgacatgacaggatgtcggacagaatgccactccctcgctcacaacgaaccggcagtacaggaggtgaaagtttatcgccaccattgccagcaaccgcagcagctatatcgggagctacgcgcgcagggcgtgcgcgccgttcgttttattccacagctcagagcggaagatgccaatgcatggggaaatttcctttgcgccattttccacatctgggcgcgggaagatattggccgcataacgattacgttatttgaggaaaccctgcgtatctggtgcggcgaaccgttgcgcgaacaacggcagttggccgccaatagcgcctgttttgtctgtgcgtggcggcgattatgcgcaggcgacgacgatccgctctgtgaaggctaccgccagttctatgtcgccagcgcgccctgtatgcgggtcatgcgcgatctgcgtaaacagcagcggtcaccgggcgaactgatgccgctgctgcgggcgatttaacgccccttcgccagatactgcgccatctcttcttccggcaccatgccgccgccggtcgcccataccaggtgggtggagtggcgtagctgttcgtcgctcagtccttgtagctgatggtacgctttactggcgcagacgcgctgcggcccggccataccggccagcgcggacggctcaaggcgaatattttccgccgttgccagccagcccagcatgtcgtacatcgtttgatcgtcgagagtatacaggccgtcgagcaggcactccatcgcccggccaacgaagccggaagcgcggccgaccgccagaccatcggcggcggtcaggttatcaatccctaaatcctgcaccgcaatctggtcatggagcccggtgtaaatgccgagcagcatacagggcgaatgggtcggttcggcgaacagacagtgaacatggtcgccaaacgccagtttcaggccaaatgcaacgccaccggggccgccgccaacgccgcatggcagatagacgaacagcgggtgatcggcatcgaccacgcgtcctgcctgggcaaactgcgctttcaggcgttcgccggccacggcatagccgaggaacagcgtgcgcgagttttcatcgtcgatgaagaaacagttcgggtcggattccgccgccttgcgcccctgttcgaccgccacgccgtaatcttcttcatactcaacgaccgttacgccgtggctgcgcagtttggcctttttccatgcgcgggcatccgccgacatatgcaccgtcaccttaaaaccgatgcgcgcgctcatgatgccaatcgacataccgaggttgccggtagaaccgacggcgatgctgtactggctgaagaactgtttgaattccggcgtcagcaatttgcgataatcatctgcgatggtgagcagcccggcttccagcgccagcttttccgcatgggtcagcacttcataaatgccgccgcgcgccttaatggaacccgaaatcggcaggtggctatcttttttcagtaacagatcgccattaatcggctgattgaattgttgctcgaggcggcgtttcattgccggaatggcaaccacttctgattcgataatcccgccggtggcggccgtttccggaaaggcttccgccagatacggcgcgaagcgctgcaggcgttcgtgagcgtcttttacatctgcggcggtcaggccgacatagggcaaaccttgtgccagggtcgtcgtcgccgggttaaaccaggtggtttctttcagcgcgatcagctcctgcacaagcgggaaggtcgcggttaattgggtcaggtcagcgtttttcatattacgtctcgttcgcttagatgatgaaagaaagcaggaaggtggcggcgagtgcaagtaaagaagcgataaatgtcgccgtcgtataatacttgaacgtttcgctgaggcttgcgccacagtattgtttcaccagccagaacagggaatccgttacgatcgtgcagccaatggcgccggaaccgatggcaatagcgatgatctccgggcttacgccgggatacagcggcagcatcggggcgacgatagcggtggcgcccatcatggctacggtagcggaaccgacggcggcgtgaaggatcagcgccaccagccaggccagcagaatcggatgcatatgcagattcgagaggatcaccgccaggctatcggccaggccgctggatttcaaaatcgcgttgaacgcgccacccgcgccaataattagcagaatattagcaatcgatccgaagccgttttcagtatgggtcagcaggacgcccatccccatttgccgacgaataccaagaatgtaataagcgacaaagacggcaataaacatcgcggtgatcgggttgccgataaattccagcaacatatacagcgtgccgcctttagccatgttcaattcagcgacggttttcaccagcatcagcccaatcggtagcagcacggtaaatagcgtagcgccgagcgagggcagcgtcgattcttcgcgtacttcaaggttggaaaactcggtcggcaccggtttaaacggcaggcggttgccgagcagcttgaggaacaatgggccgccaaccagtgaggcaatcaggccaaccagcaggccgtagacgatgaccgtaccgatatctgcgccgagtttattcgccacgaacagcgcggccggatgcggcggcaccacgcaatgcaccgccatcagcgcggtacacagggggatggccagcttcagcagcgaggtattggtttttttggcaatggagaacgccagcgggattagcagcaccacgccgacttcaacaaacagcgtaataccgcagatcaggccaaccagcaccataattacgtccgccgacaaccagcgacagcgctgcagcgccaggccgatgcgttccgccgcgccggagacttccatcatcttcccgaggatggtaccgagaccgatcaccgccgccaggaaaccaagcgtaccgccaataccgctctcaatggcgttgaccatatccagcggccccatgcccatcatcgcgccgacgaaaaagctcgccagcaggagcgccagaaacggatgaaacttcagtttgacgatcgttaaaacgattaacacgatactgataaatagcgtgcataccacccagatttgagattccataccccacctcgccgtaaataacgtgtggttattgaacagaaaagcgacataggctgacaaacgatataaatcgcctttcagatgagtcagattgatgcaaaagcgtgatttggttcttaaatagaccgttaaatgtgtattgggtcacttttattcatctttcaggcgcgctccggctgcgtttttttttacacttaccggcaaagaaaaggcggggaatcgtgatggatgtgatgaaagagatgggtaatcggctgctgaacggctggcagttgtcaaagctgtatacctttgaagtcgcggctcgccatgagtcctttgcactggcggcggaagagctgtcgctgacgccgagcgccgttagccatcgcatcaaccagctggaagaagagctgggtattcagctatttatacgttcgcaccgcaaggtggagctgacccgcgaggggcggcgggtattctgggcgttgaaatcctcgctggatagccttaaccaggagattctggatattaaaaatcaggagctctccggcacgctgacggtgtactcgcgcccgtcgatcgcgcagtgctggctggtaccggcgctgggggatttcactcgccgctatccgtccatctcgctgactgtgctcaccggcaacgataacgtcaatctacagcgggcgggtatcgatctggcgatctattttgatgatgcgccgtcatcacagctaagccatcattttctgatggatgaagcgatcgtgccggtatgtacgccgaattacgcgcaacagaagcagttaatccacaatccaggcaatctgcgctactgcacgttgctccatgaccgccaggcatggagcaatgattccggtaccgatgagtggttcagttgggcgcagcaatttgcgattgaattgccgcaatcgtcgggtatcggcttcgatcgttctgatttagcggtgattgcggcgatgaatcacgtcggggtagcgatggggcgtaaacggctggtgcagaagcggttagaaagcggggagcttatcgcgccgttcggcgacatgacgctgaagtgtcaccagcactactatgtgacgaccctgccgggccgtcagtggccgaaaatcgacgcctttatcgaatggctgcacagcctgacataagacaaaagcagccacccgggggagcgccagcggcgcttagaccggctgctggtggctggtaaagcgcgaggccagcggcagccagcacagcagaatcaacagacccattaacatcatcagcaggccgaggctgctttgcccggtttgcggcatcattgccgacagccaggccagcacgccggagccgatattctgcaagccgccaaccagcgcgccagcggtaccggcgaggaacgggaatggttccatcgcgccgctggtagccagcgggaacaacatacccgcgccgaagaagaacagcgccgcaggcaccagcagtgtccagacggtcataatgccgaacagccccggcaaccacatcataattcccgccagcaggcagcagataaccgactgccacatcagcgttgagaagcgtttattcggacggccagcgaaccacgcgccgaagaacgccgccgggatcggcagaataaacagaatactgaccgccatactgctcaggccgaggaccgcgcccatcagcacgccggaacaggcttcgaacaccgcaatcccggccagcccgcccaccagcatcaacaggtaacagttaaaggcgccggtaccgaacagcgttttgtagctggccagtagtttcgtccgcggcgcgccttgtgggcgcgtttccggcatccatttcgccatactaatcgtcacgccagcgcacagtatgagcaggaaagcgtagcaggcgcgccagttccacagggtatcaaggatgccgccgagcagcggcgcaatcagcgggctgaccagtattcccatatttaacaaactattggcgtgacgcagctgcgcgccttcatacaggtctcgcggcagggtgcgcgccatcacgccgccgacgccggtgcccatcccctgcatggcgctggcggcgatcaacaccggcaggctatgggtggtgatggcaaccagcgtcgccagcataaaaatagacatcccgacgaggatcaccgggcggcggcccacgcggtcggagagcgggccgtagaacagctgggaaatgccgtacgtcaggagataggccgccatcacgctttgtaccgccccttcgcggacgttaagcgataccgccatgtcggcgatagccggaatataaatggtctgcgccatctggccaacggccaccagcagtaccagcatcaacaacaaattgaagttcttatgccgtttcatgtcgatgaatacttcgtgagcaatgagaaatgaagaatatgtgactggcacaccccttaaacgatggaggaatctaccacaataagataacagaacaactacatagcaccgattgttggggaaaattcaggcaggttttgtaaacaggatcggcaactaatgttgccattttaatctatgagaggcgcagcaggattgctccggcggcaataccgcaggcggcaacgatgcgcagcgctacaacttgttccttcaggacgataaacgcgatcagcgcgccgaacagaatggaggtttcacgcagcgcggcgaccaccgccagcggcgcctgagtcatcgcccatagcgccaggccgtaggatcccatggtgccgacgccgccgaggatgccttttttccagtgctggcgtaaataacggctggcttcgcgccgccgcgccaccatcgcccagcacagcaggcagcaaccgttcataaaaaaggtccacagggtatagccgagcgccgatcccgccagccgtaccccggtgccgtccaccagcgtataacccgcaataaaacaggcgttgatcagcgccagcatgatgcctttgcgggaactgacgcggccgttaaaggccatcgccagaatcgccaggcagatgacgccaatacccaaccaggctagcggcgataagcgatcgccgagaaatatcacgctgatagccgcgaccagcaacggcgcggtgccgcgcattagcggataggtctggctcatatccgacacctgataggtcttcgccactagtaccgtatacaccacctgcaatgcacatgacgccaccagataaggggcgctggccagcgtcggctgcggcgcgaaggggagcatcaccagggcgatcagcgaggccgacccgctgacgcttatcgccgcgtacattttatcgccgctggctttgacgatagcgttccagctggcgtggagcagtgcggcgaaaagcaaaatgcagaatacggtgatggtcatcgcaggcagattcagcagttaaggtcagcggactgtaacatgaccccgttccgccagccagccacgcttacagcgagcagaacaggcgatgcgtgacccgcggctcatcgtataccgggcggaaaccaaagcgttcataaaagggccaggcctgcgccggggcatgagtgttaaggaaatcgaaccaggcgccggaatgcgtgatgactgagagcagcagctgctggccaattccctggcggcgatggctatcgcgaatatagagatggcgaatgcgcccggcccgcggctgctggctgaaggggtcgacgttcagaccgcagaccccaactaactggccacggacgaacgcgcccagcagcttttcaccaggggcgttaaagcggtttttgccgctttgccagttttccgccagccgacgcagcatattgaagtgctgttcaaggctttcggcgcgcagcgcaacgaaccccggatcctccggcgttgttgcggcaattaatagcggtggcatggttcctccatcaagtcttcccggaacgcccgaaggacgcctgtagggggggcggtatcccgcccccctcaggtgcgacttgaacctgaatcagcggaactgtttcaggactgcatcaagtagttgcaacacagcaaccatgagtttcaggattaaaataataatatccattccgcccatacgcgcgtctcctgtggttaaggagcacaataagctgacgtacctttccgctgcctgttgccagcttatccctgttctcacaggggttgcgcagtggtggccgtacgggccggacacgacgcattgttgacgtaacacagtgtgctctctcggggttaaggcactgacggcaccacccgtttcagccaggacttcgttgcgccggtcaaacttgcggcccccgaatggcacaaagtgaacacatccagtatagataaatactgtatgtatgaacagtattttttggacaaattcgcacccgtcgtccatactctatgacagagaaatttcgaccttaaattgcgcgaattgcagcgatcgcgtatacttttgtcgttgacgtaatacagtgtgcttgcggctaccacccgtgaaaatgctgataaaaacctcgctccggcggggttttttgttttctgccgctgatgtcgcgaattgtgatctttcgcgcaaattctcgtggatgaaaataaatccattgtgaaaacgcaaaacctgtgtttgtataaattcagcttatttttcgacacaacaggtccctaatgaacgctgccatgatgacttcgaccctactaaaaaccgcgcctgccgcggtggtcgtcgtgtctgtggtggtcgtcgtcggcaatgcgccgtagggtccggaacaacacgaattccaaaccccgccggcgcaaaccgagcggggttttttgttggcgagccccccggtaaagtcggcccagaataaaaggactggagcatggcaagttcgggcaccacatcaaacacaatgcgctttaccggcgcgcagctggttgttcatttactggaacgccagggtatcactatggtcagcggcattccgggcggctccatcctgcctatctacgatgccttgagccaaagcacgcagatccgccacatcctggcacgccacgagcagggggcgggttttatcgctcaggggatggcgcgtaccgaaggtaaacccgcggtctgcatggcctgtagcggccctggtgccaccaacctgattaccgccatcgccgatgcccgcctcgattctattccgctggtctgcatcaccgggcaggttccggcctcaatgatcggcaccgacgccttccaggaagtcgatacctacggcatctctatccccatcaccaagcataactacctggtgcgcgatatcgccgagctgccgcaggtgatgagcgacgccttccgtattgcccagtccgggcgccccgggccggtgtggatagatattcctaaggacgtacaggcggcaaccattgaactggaaacgctgccggagccaggcgagcgcgccccggcaccagcgttcgcgcctgaaagcgtgcgtgaagcggcgacaatgatcaacgcggcgaaacgcccggtactgtatctgggcggcggcgtgattaacgcgccgcagccgattcgggacctggcggaaaaagccaacctgccgaccaccatgaccttaatggcgctgggtatgctgccgaaggcgcatcctttgtcgctgggcatgctggggatgcacggcgcgcgcagcactaactttattctgcaagaagctgatttattgattgttttaggcgcgcgttttgatgaccgggcgattggcaagaccgagcagttctgcccgaacgcgaagattattcacgtcgatatcgaccgctctgagcttggcaaaattaagcaaccgcacgtagcgattcagggcgatgtggcggaggtcttagcccagcttattccgcagattgaggcgcagccgcgtgatgagtggcgccagctggtggctgatttacaaagagaattcccctgcgccatcccgcaggaaagcgatccgctctcccattacggcctgattaacgccgtggccgcctgcgttgatgatgaggcgatcatcaccaccgatgtgggtcagcatcagatgtggacggcgcaggcctatccgctcaaccgtccgcgccagtggctgacttccggcggtctcggcaccatgggcttcggcctgccggcggccatcggcgcggcgcttgcgaatccgcaacgtaaggttatttgtttctccggtgacggcagcctgatgatgaatattcaggagatggccaccgccgccgaaaatcagttggatgtaaaaattattctgatgaacaacgaagcgctggggctggtgcatcaacagcagagcttgttctatcagcagggcgtcttcgccgcgacctatccggggatgattaactttatgcagatagctgccggttttggtctgcaaacctgtgatttaaataacgaatccgatccgcaggcggcgctgcaggcgattatcgaccgccctggtccggcgttgatccacgtgcgtatcgacgcgcagcaaaaagtgtatccgatggtaccgccgggtgcggccaatactgagatggtgggggaataagccatgcaaaagcaacacgataacgtcattctggaactcaccgtccgcaaccacccaggtgtgatgacccacgtctgcgggctatttgcccgccgcgcgtttaacgttgaaggcattctctgcttgccgattcagagcagcgagcacagccgcatctggctgctggtaaatgatgaccagcggctggggcagatgattagccagattgaaaagctggaagatgtcaccaatgtggcgcgtaaccagtccgatcccaccatgtttaacaaaattgcggtgttcttcgaatagcgctcaaggcttgaacagctacgcgcttaccgctaaggtaagcgcctttgccggatggcgctgcgcttatccggcctacagggagtgaatccgtaggccggataaggcgtttacgccgccatccggcgctttcaggcaccaggaaacaccatgactaccatcgcccttattgacgatcatttgattgtccgctccggttttgctcagctactggggctggaagctgattttcaggttgtcgctgaattcggctgtggacgcgaggcgctggcggggctaccggggcgcggtgtacaggtctgtatctgcgatatctcaatgccggatatttccgggctggagctgttaagccagttgccgaaggggatggcgaccatcatgctgtcggtgcacgatagcccggcgctgatcgagcaggcgctgaacgccggcgcgcgcggcttcctgtcgaaacgctgcagtccggatgaactgatcgccgcggtccgcacggtggcggcgggcggttgctatctcacgccggatatcgccatgaagctggccgccgggcgccaggatccgctcaccaaacgcgaacgccaggtggcggaaaagctggcgcagggtatggcggtgaaagagatcgccgctgagctcggtctgtcgccgaaaaccgttcacgttcatcgcgccaacctgctggaaaaactgggcgtcagcaacgacgttgagctggcgcgccgcatgttcgatagctggcaatgaacgccgtcgtttcacgattgctgtcggtgatcggctgcgcctttatcttctcagccgcctggttttgcctgtggagtatcagtctgcatctggtggaacgcgcggatttagcggtgctgctgtttccctttggcctgcgtttagggctgatgctgcaatgcccgcgcggctactggccggtgctgctgggagccgagtggctgcttatcttctggctggcgcaagaagtggcgctggcgcaccctataatattgatgaccggaagtctgctgaccctgctgccggtggcattgatttcacgctatcgccatcagcgagactggctaacgctgttgcgccagggcggggcgctgatcgccgcctcgttgctgcaatcgctgccgtggctggcgcaagaagggagcgagggactgaccgcgctgttgttgacgctgaccggcggcctgacgctggcgccgacctgcctggttatctggcattatctgaccagtaccgtctggcggccgttggggccgtcgctggtgtcgcagccggttaactggcgtggccggcatctgatctggtacctgctgctctttaccgtcagcctgtggctacagctcggattgcccgccgaactctcccgctttacccctttttgtctggcgctgccgattatcgctctcgcctggcactacggctggcagggggcgctgatcgccaccctgatgaacgccattgcgctgattgccagccagacctggcacgatcacccggttgatttattgctttcactgctggcgcagagcctgaccggactgctgctgggcgcggggatccagcgattgcgcgagcttaacctgtcgctacagaacgagctagcgcgcaatcggcggctggcggaacgcctgctggaaacggaagagagcgtgcggcgtgacgtggcgcgcgagctccacgatgatattggccagactatcacggcaattcgcacccaggcggggatcgtgcagcgtctggcgccaaacaacgccagcgtacggcagagcggccagttgatagaacagctgtcgctgggggtttacgactctgtgcgaagactgcttggtcgtctgcgtccgcgccagcttgacgatctgccgcttgaacaggcggtacgttcgttgatgcgtgaaatggaactggaagaccgcggtatcgtcagtcatctcgaatggcggattaacgaggcggggctgagcgaaaaccagcgcgtgacgctgtttcgcgtttgccaggagggactgaataatatcgtcaagcacgccaacgccagcgccgtcaccctccagggctggcaacaggatgggcaattgatgctggtgctggaagatgacggctgcggcctgccgccggggtcgaatctgcaggggttcggcctgaccggcatgcgtgagcgcgtgacagcgctgggtggtacgttaactatctcctgcacacacggtacccgcgtgtgcgtcaatttaccgctgcgttacgcctgaaaggagcgccgatgtttgcctttttaaaagcgccgccggacgccgcgccaattagcgataaacgcgagctggacgagcgttatcgttactggcgtcgccatattctgcttaccatctggcttggttacgcgctgttttatttcacccgcaaaagctttaatgccgcggttcccgagatcctcgccagtaacgtgctgacccgcagcgatatcggcctgctggccacgctgttttacatcacttacgggctgtcgaaatttttctccggtatcgtcagcgaccgctccgacgcccgctattttatggggctggggctgattgccaccggggtggtgaatattctgttcggtttttccacttcgctatgggccttcgcgctgctgtgggcgctgaatgccttcttccagggctggggctcgccggtgtgcgcccggctgctgacggcctggtattcgcgaaccgagcgcggcggctggtgggcgctatggaataccgcgcataacgtcggcggcgcgctgatcccaatggtcgtgggcgcggcggcgctgcattacggctggcgaatggggatgacgattgccggctgtctggcgatccttgctggactgtatctgtgctggcggcttcgcgatcgcccgcaggcggtggggttacccgccgtgggcgactggcgtcacgatgcgctggaaatcgcccagcagcaggaaggcgcagggctgacgcgcaaagagattctgacccgctacgtgctggccaatccctatatctggctgctgtcgctgtgctatgtgctggtgtacgtggtgcgggcggcgattaacgactggggcaatctgtatatgtcggagacgcttggcgtcgatctggtgaccgctaactcggcggtgaccatgtttgagctgggcggttttatcggcgcgctggtggcgggatggggctcggataagctgtttaacggcaatcgcgggccgatgaatctgatcttcgccgccggaattttgttgtcggttggcgggctgtggctgatgccgtttgccagctacgtcatgcaggcggcatgcttcttcaccaccgggttcttcgttttcggcccgcaaatgctgatcggcatggcggcggcagaatgttcgcataaagaagccgctggggcggccaccgggtttgtcggcctgttcgcttatcttggcgcctcgctttccggctggccgctggcgcaggtgatggatatctggcactggaccggattcttcgtggtgattgcgattgccgccggcatttccgcgctgctgctgctgccgtttttaaacgcgcaggcgcctcgtaccgccagcgaagcgtgatgtagctcaccctttcgccgcgaacggggcaaaactaagaaattttcccggttttacctggaagccgtctcaggccagacggcgcgcgggtttttacaatgcctggttattacgcaggcataaaaaaatcagctcaggagatacccatgctggcctttctgaatcaggtgcgcaagccgaccctggatctgccgctcgatgtgcggcgcaaaatgtggttcaaacctttcatgcagtcctatctggtggtcttcatcggctacctgaccatgtacctgatccgcaaaaactttaacatcgcgcagaacgacatgatctccacttacgggttgagcatgacgcagctggggatgattggtctgggcttttccattacctacggcgtgggcaagacgctcgtctcttattatgccgacggtaaaaataccaagcagttcctgccgtttatgctgatcctctccgctatctgtatgctgggctttagcgccagcatgggggcgggttcaaccagcctgttcctgatgatcgccttctatgcgctgagcggtttcttccaaagcaccggcggttcgtgcagctattccaccatcaccaagtggacgcccagacgcaaacgcggcaccttcctcggcttctggaatatctcccacaacctcggcggcgcgggcgccgcgggcgtggcgctgtttggcgccaactatctgttcgacggccacgtgatcggcatgtttatcttcccgtcgattattgcgctgatcgttggctttattggcctgcgctacggtagcgactctccggaatcctatggcctcggcacggcggaagagctgtttggcgaagcgatcagcgaagaggacaaagagaccgaagaaaatgcgatgaccaagtggcagatctttgttgagtacgtgctgaaaaacaaagtgatctggctgctgtgcttctccaacatcttcctctacgtggtgcgtatcggtatcgatcagtggtccaccgtgtatgccttccaggagctgaagctgtctaaagaggtggcgattcagggctttaccctgtttgaagtcggcgctctggttggcacgctactgtggggctggttgtcggatctggccaacggccgccgcgcgctggtggcctgcgtcgcactggcgctgattatcgccaccctcggggtttaccaacatgccagcaaccagtacgtctatctggcctcgttgtttgcgctgggcttcctggtgtttggtccgcagctgttgatcggcgtcgccgctgtcggctttgtgccgaaaaaagcgatcggcgccgccgatggaatcaagggcaccttcgcctatctgatcggtgatagcttcgccaagctgggtcttgggatgatcgccgacggcacgccggtcttcggcctgaccggctgggccggcacctttgcggcgctggacgccgccgccatcggctgcatctgcctgatggccatcgtggctatcttcgaagagcgtaaaattcgccgcgagaaaaagaatcgagttttgcagactgcctgattcaccaggtatttggtaaccttgcccggccattgcgccgggcttttttatttcttgcgtaatatgccaggtccgacagtcgacagcaggcaaattcccattatgatagtgaggctgcgattggatgagaggatgcatgatctggataggactggccaccctggtagtggtatttgttgtgggatttcgggtgcttacctctgattcacgccgcgcgattcgtcgcctgagcgaacgccttggcattacgcctgttccgttggaatcgatgatcgatcagctggggaaaaccgccggtaatgagtatttgcgttacctggagcggccgaatgaagcacatttgcagaatgccgcgcaggtgctgctcatctggcaggtcgcgattgtcgacgccagcgaaaaaaatctgcattactggtatcgcctgatgcaaaaagcgcgtttagcggcgccgattaccgacgcgcagctccgcctggcgcaaggttttctgcgcgagctggacccggatgtgagcgatttacataacctacagcagcgctataacgacctgtttctcccggaagacggcgtgcactggctgcactgatctcattgttatccggcctgtggttcaaaaccatatctcccttacgttccttgtaggccggataagcgtaagcgccatccggcagaatgacgaggtctgtgttctcaggctacgcttttgtattacgttatgaaaagcgagaagagttgcgaaaacgttaagtacgtcacatacaaaatgttacactgcgcagctttccgccactttcttcgcaggtcactcatgagtcattcaaatgaaaccaaaccccatgcacgcgatctcgcgcggccaaactggtcggcggtcttcgcggttgctttctgcgtcgcctgcctgattaccgtcgagtttttgccggtcagcctgttaacgccgatggcgctggatttaggcatctccgaagggatggccgggcagtcggtgacgacgacggcattcgtcgcgatgttttccagcctgtttatcaccacggtgataggtaaaaccgatcgccgctacgtggttatcctgttttcgctgctgctgaccctttcttgcctgctggtatcgtttgccgatagcttcaccctgctactgctggggcgcgcctgtctgggcctggcgctcggcggtttctgggcgatgtcggcatcgctgaccatgcgtctggtgccgatgcgcgtggtgccgaaagcgctatcgattattttcggcgcggtatcaatcgcgctggtgatcgccgccccgttgggcagtttccttggcgggcttatcggctggcgcaacgtctttaacggcgcggcggtgatgggcgtgctgtgtacgctctgggtgctgaaagcgctgccgtcgcttccgggtgaatcggcggctcagcagcaaaatatgtttggtctgctgaagcgtccgggggtgatggccgggatgtgcgccattttcatggcctttgccggacagttcgccttctttacctatattcgaccggtatacatgacactcgccggctttgacgtcgacggcctgacgctggtgctgctgagctttggtatcgccagctttatcggcacctcgctctcctcggtggtgctgaagcgctcggttaaagcggcgctggcgatttcgccgctggtgctgaccgcctgcgcggcggcgctggtactgtggggagaaagcaaaatcgtcgcctcgacggtggcgattatctggggcttcgcgtttgcgctgattccggtgggatggtcaacgtggatcacccgttctctctccgatcaggcggaaaaagccgggtcgattcaggtggcggtgatccagcttgccaacacctgcggcgccgcggtcggcggcgttgcgctcgaccacttagggctgctgtcgccgctggtgttgtcaggaatattaatgctgtttaccggcctgctggtgacgaccaaagtgaaggtgaattaacccgcttacggccgttcgccttttgccagccgggcgttgatgtcggcaatcacttccggcagatccgccagggtatcaaccacatagtgagccccggcggcatacagtttgcctgccgcccgctcgcgacgggtggcgatttcctctttcgacatcgcctggtactcctccctggtagcgccgaattcgttaccggacactgccaggccgacgctccacatcccggcatgtaacccttcgctgatgcccggtgcggcatcatcgaccttcacgcagtgggccacatcgtctatgcccaaggtaattacgttctgcagcgccatccacgggcccggacgaccgccgacggcaagatcatcggtggcgacccagtggtccggggcgtagccctgagcggcagcggccggtaccagcttttccatcaccgggcgcggataacccgagcaggatccgatcttcaggccctcggcgcgaaacgcggcgatagtgtcgacaacgccggcaatcggtgcggaaaaatcgacaaccttagcgatttgcagcggcataaacgcggcgtagatcgcatcgatatcggcgacagtcatcgcgcggccgaatttggcctgccagcggctatcgacagcagggagtttgcccagcgcctcaatgtgctgccacttgccaagccccattggcacgcgggcctcttcaagggtgatctcaatatcgaaggcctggcggaaggcctcgacgaaaatttgcgtcggggcgaaagagccgaagtctacagtggtgcctgcccagtcaaggatcagtgcgctaatacggttcatggcggttccttattgtttccagtacatggcgttgtcgatagccgccagcagggcggtgatatcggcgtcgtagacttcgccaatgttgccgatgcggaagcaatcgctttgcgatactttgcccggatagataacgaagccctgatctttcagcttctggtagaaggtgtgaaagcgatactgcggcgcatccggtgaataaaaggcggtaatgatcggcgagtgcaggctatcgtcgagcagtggccggaagccgagcgcgcgcatcccggcgaccagacggcgttgattgttgcggtagcgctgatagcgggcgctaacgccgccctcctgcgccagctctttcagcgcctgggcaaaggccagcacggtatgggtcggcgaggtgaagcgccacttaccgtggttatcttccatgcagcgccactgggcgtacagatccagtgatagcgagcgcgaacggcctttgcaggcggccagttccgcttcgcgagcaatcacgaaggcaaagcccggtacgccctgaatgcatttgttggcggagcttatcaggtaatcaatattcagcgcggcgatatccaacggaatgccgccaaagctgctcatcgcatcgacgatatagcgtttatcgtaccgttttgccagttcggctacctcttcgatcggattcagtatgccggtggtggtttcgctatgtaccatcgcgatatgggtgatcgccgggtcgttctgcaggatctgttcgatcgcggccgcatctggacgggagacttcgccgcagtcgtaagggtggcaggcgatgcccatcagttgcgccatctcaatcatacgcgcgccataggcgccattgctgacgatcagcactttgccttgttcgccgatgacgctgccgagcaccgcttcgaccgcgtagctgccgctaccctgcagcagcaccgccgtataaccgtcggccggggtagccaactgcaccagctgctggcgaatggtctgtaccacgccgagattgtaatcatcatcccaggtacagctatcgaacaacatcgcctcttttaccgtacgggaggtggttagcgggccgggggtcagcagcaagtagttccgtgaagtcatttgtctcaccatttggtctataccagatttatatttatcatggagacaaagccggggcagggtcaaaggaaatgtggcgctgcaacaaaaaattcatctggctatgtataatgagcgcacgaaaagtggcagtgagtaaacatgaaatcaccctctggcgagatgccgcaatacctgatgattaaggcgcagctgcaggcgcgtattcaaaacggcgcgttgaaaagcggcgataagctgccttcagagcgcgaactgtgcgcgctgttcaacacgacccggattacggtgcgtgagagcctggcgcagctggaggccagcggcgtgatttaccgcgctgaccgccgcggctggttcgtgacgccggagcgtctgtggttggatccgacgcagaacaccaacttccacaagctatgtctcgagcaggggcgcgaaccgaaaacggtgctgcttgaagggcgcttaaccgccgtgccgctggacgtgatggccccgctggcgctgcagcccttcgatcaggtttacctgctgacgcgtctgcgctatgccgacggccggccggtgtgctactgcgaaaaccactgcctgcccgcgcgggtgcctgagctgctgcgccacgatcttaacggcagtctgaccgagatttatcaaactcagtacgacctgatctataccagtatgcatctgtcgttttatcccacttcaatgccgccgcaggctgccgaagcattgggggtgatggaagggcgcccggcgctgctgctgcgccggctgaattacgatcagcatgggcgtattctcgattacgatattgaatactggcggcatgacagcctgcggatcgaagtcgatacccattgattttattagttaaattttttgatctccccggtggcgctagcgcttaccggggctacgcacttcccctcgttttaactctttcgacacacttctttcatcgttttgtcataaacccccggtagcgtgaaagaaaatctggtctacaccagaataactgactatccgatgaggcttaaacgatgaaactctcccgacttgctctgctgtccctgttcgcgctgaccagctctccggtttgggcggacggcgtcgtcacggtttactccgccgacggcctgcatgacggcgataacagctggtatcagagccagttcgccgccttcaccaaagcgacgggcatcaaagtgcagtatgtggaaggcggctccggcgcgatcgtcgaacgtctggcgaaggagcgcaccaatccacaggctgacgtgttggttacggtgccgccgtttatccagcgcgccgcgaaagagcaattgctggcaacctttaccccgcagggtagcgcgcagatccccggcgctaacaaccgctacgcgccgctggtgaataactatctgaccttcatctataacagccagttgctgaaaagcgcgccggccagctggcaggatctgctggatagccgctacaagaacaagttgcagtactccacgccggggcaggcgggcgacggtaccgcggtgatgctgcaggcgttccacagcctcggcggtaaagacgccggttttgcgtatctgggtaagctgcaggccaataacgttggcccatcggcctcgaccggcaagctgacggcgctggtcaacaaaggcgagctgtacgtcgccaacggcgatttgcagatgaacctgtcgcagatggcgcgtaacccgaacgttaaaattttctggccggcggatgataaaggcgagcgcagcgcgctggcgctgccctacaccatcgggttggtacagaacggaccgaacagcgaaaacggcaagaagctgatcaatttcctgctggataaaccggcgcaatccagcgtcagcgcgctctcctggggccttccggtacgcagcgatgtggcgccggatgacgctaactttaaggcggcgaaagcggcgctcgacggcgtgaagagctgggagccgaactgggatgatgtcgcggtatcgctgtcggctgacattgcccgctggcataaagtgaccgatagcgagtaagcctgatgttgatgaaaaccaccgtcacttcttccccgtcgctggcggggacttccgggatcaccctggactcgctgcgcgtttcataccacggcaacgtggtcttaaaaccgctgtcattgaccattgaacccggtgaggtgctggcgctgataggcccttccggttccggtaaaaccacggtgctgcgggcgattgccggttttgtgcaaccggctggcggtcggatcctgatcggcgatactgacgtcacccagctgccgccgtacaaacgcgggctggcgatggtggtgcagaactacgcgctgttcccgcatatgaaggtggaagataacgttgctttcggcctgcgggcgcagaagcagcccagggggcttatcgccgagcgggtgaccgaagccttaaaaatcgtcggtatggcggattacgccacccgctacccgcatcagctttccggcggccagcagcagcgcgtcgcgatagcccgcgcgattgccgtgcgtcctcgggtactgttgcttgatgaaccgctgtcggcgctggatgcgcaaattcgtcataacatggtggaagagattgcccgtctgcatcgcgaactgccggaactgaccattctctacgtcacccacgatcagaccgaagcgctgaccctggcggacaaaatcggcatcatgaaagacggttcgctgatcgcccacggcgaaacgcacgagctctatcactatccgccgaaccgctttagcgccgaattcctcggccgcgccaatatcctgcaggcgacggcgctgaaagacagcaccgagccggggctggttagcgtgagctgtggcggcggcctgattaacgccttcagccggggcggcctgcatggtaacaacaagctgttatgcattcgcccgcagcacatgagcctggcgccgcgatcggcaaccagtaatcgtctcaatgctaccctgacctcggtacactggcagggcgatctgacgcatctgctgtgcgatgttgccggcgaagcggtgcggatcgtcatgacccacgtgaacccgctgccgcgcgcgggggacaagctggcgctctacttcgaacctggcgatgcggttctgatcgaggtgcaataatggcgcaaaccctcacgcttgcgcgtccggcgcgaaacttacgcccttacctgtggctggcattgccgctgctggtgctggcgacgctatttttctatccgctactgttgatcgccgaacaggcattacgtgacgccagcggcaacctgagcctcgagactttctggcaggtgattgactcaaaacgctttattggcgcgctgctcaataccttacagattgcagtgttcgccacccttggctgcctggtgctcggcagcgtgctggcgctaattctggtctttattccgttccccggcagccaactggtgagccgggtcattgatacttttattgcgctgccgaccttcctgattaccctcgcattcacctttatttacggctcggcggggctgctcaacggcaccctgatggcgttgtttgcttttgaactgccgccggtagactttctctattcaataaacggcgtgattctggcggagattaccgtctttacgccgctggtgatgcgcccgctgatggcgggactgcggcagatagataagagccagctggaagcggcgagtattctcggcgcccatccgctacgggtgattacccagattatcttcccggcggcgctaccggcgctgatggcaggcggcagcctgtgcctgctgttgaccactaacgagttcggtatcgtgctgtttattggcgccaaaggggttaataccctgccgatgatggtctacagcaaggcgattctggagtcggattacagcgtggcctgcatgattgcgctgattaatattctgctgtcgctggggctgtttatactctatcggctggctgcggcgcgcactggcgtaaggagttaacgatgttgatttggtcgcgtaaaggccgcgcggcggcgggcgcgctggcggtgatgctttttgccggcattttcctgctgccgctggcggtgattttactctccagcctgagtaaacaatggaacggcctgctgcccaccggctttacctttacccactttgttaacgcctttcgcggcgcggcgtgggattcgctgttttcgagcctgatggtgggcttctgcgccagccttctggcgctgctgtgcgggatgtgggcggcgctggcgctgcgccagtatggcgcgaagttacagaaatatcttggcctggcgttttatctgcccagcgctatcccctcggtttccgtcggactgggcattctggtggcgttcagccaggggccgctgcagatgaatggtactttttggatcgtcctggcggcgcactttgtactgatttccgcctttaccttcagcaacgtaacgaccgggctggcgcggatttccgccgatattgaaaacgtcgcctccagtcttggcgcctcgccgtggtatcgcctgcgtcatgtgacgctgccgctgatgacgccgtggatgatttcagcgctggcgctgagcttatcgctgtcgatgggggaactgggcgcgacggtgatgatctatccgccgggctggacgacgctgccggtgactattttcagcctcaccgatcgcggcaatatcgccgatggctcggcgctgaccattgtgctggtgggcgtcacgctgctgttgatgatgaagcttgagcgcatcgcccgccgattaagccagagataaagaattgatgacgccacctgggcacgggtctgactgcccggcggcgctacgcttgcgcgggcctacggggaggaggttttccgtagatattcttctgcgttatgactctcatggcacagggagcgcacagagggcggccagtcgccgccaggggttttcccggaggcggcgcgttgcgccttctccgggctaccaaatcgcacagcgctgtagccccggtaagcggcagcgccaccggggattttgaggccgccaacaccggcagtttcagccagcatagtgaataaattaaaggtaggtcgcacggaccgtaggccggataaggcatttatgccgccatccggcataaatgcgggcacaggttattacctcagaaccatgcctcaaacatgccgccgatgttcagcgaatccagccgctcgtcgctggtgccgtctactttcgcggtgtgctcgttattcacctggccgccggtaacatagaagcgcagcatcgggcggaactccggccccatgccgatggcgatgttctgcgacagcgtcagcttccagccgtggttatccccgccctggtcgtagtcaacgcgctggtagcccgcttccagccaggtcgagtgcacgtcgttccagaagtacattggccggacgatcgcgccgtagtttttacggttgtcggtattatccttgccgttgtcgtagtcgtggaaggccagcagatactcgatctgcgcctgctgggtgaacttatggctgccctcgaagctggcgtagaccgtggtcaggtcgtcggttttgttatagacgctgttatccgagttatcggaatagcgcaggatcactttgttcactccgctgtcgttgctatggctcagcaccagcccgccctgccaggcatcgaggcgcgcgtcgctgtccaccgcttttgagtcaaagccgtagttggcgtatacctcgacgtcgatcggcccggctttgatgttgtgggttttggtggtcagcgcgtagtggccgttatcgccggtatcggagctgccggtacaggtgatgcgcgacgggttggtctcatcggccatcacttccgggctacaggatttcacctgcgacaccgtcgccacgtcgaactgcacgccgccgatatcgaagttcttcacccccgcgccctggccgtcgtggttcatccagaagtagtcgttgatcccctgttgcgggcgctggtggaaatcgcggccggcccagatataggcgttggggttggattcgaggacgttggtgacgccgacgtaggcttttttcaggttaacctcgtcgctccagtggtcaaacatgacgttaagatcccagatggccccctgcgcgcttttgaacgctttgctgatctgaaattcgccgccgttgctttcgttaccgagacggccaatcgccgaggcgccgttataggagccgtcgacgccaacatatttctggtcgccggtctggaagtgggcgccatagcgggcgtagccgctaaatttcaggccgaatggaatcgccatatccggcgaagcggcggtggtttgcgggttggtaataacatcaacctttttatcggccgcggcatcaattttagcctggcggtcggccagcgctttatcaaccgctttcgcgacgatggcgtcgatctgctcctgggtaaactcctgcgccagtacggaaattgggcacagcgcggcgataaccgccatggccaatggcagctttttaactgtattcatggttatctcactttaataattaatatatgcagacaataaccgccccattctggttaaaataaaaataaccaaaataagctgatttgttttttttcagggtacagctacgccggagaaaaaatatcttattctcagtggcgaaatttaacggctagtacaaatgcagatgaattaattttttctcaaaatatatttcctgaggttattgagtttataatcagattatttggcgaaaatcccttttccgcataaattcatattttcaggtaatacaggaattactggctaacggccccggcgaccgatgcaacgcttttcgccttttcgacttcattttttattaatgaacgctcataggcgcgcaggaatggcagataaatcactgccgacatcaccatgcagataacgcacatcaccaccgggcttaaggtccagttagccgcccacgaggcgccaatcggcgcgggcgtcgtccacggcgtcagcgacaccacctggctcaaccagccaaggcgggttgcgccgtaagccagcaccgcgttgaccatcggcacgcagacgaagggaataaacatcattgggttcatgatgatcggcgcgccgaacagaatcggttcgttgatgttgaagaagcttggcacgatgcccattttaccaatagtccgcagatgcgtgacccggctacgcagcagcaggaaggccagcggcagggtcgagccgacgccgccaatcagcaaatagtgatcccagaagccctgcaggtaaacgtgcggcagcgccgcgccggccgccagtgccgcctggtttgccgacaggttggccatccagaacgggttcataatgccggtaacgataagcgagccgtgaataccggcgaaccagaaaatctggcacatcagcaccgacagcagaatcgccggcagcgaatcggaggcggagaccagcggttccagcagatgcataatcgcctgcggcaggatcatgccggtttgcgcttcaatgaacaggttgagcggatgcagagtaccgatgaccaccagtaccggaatgaggatctcaaacgaacgggcgacgccggtcggcacctctttcggcaggcgaatggtcacgttgttttgcttaagccaggcgtaaacgcgggtggagtagatggcggtgatcagcgcggtgaaaatgccctggccggataaatactgagtagaaattttgccatcggcatagggcgcggcgaccagcaggaaggccataaacgccaacaggccggacatgaccggatcgagctggaactggcgtccgaggctggcgccgatgccgaccgagataaagaaggtcataacgcccatgctgaggttaaacggcagcatcagctgttcacggtactgctgggaaaaatccagccagccgcgggcaaaaccgttagtggtctccggcgagaaaggcggaaagataaataccagcatgaaagagccgatgatcatgaacggcaatgcggcggtaaagccatcgcggatggcgataacatatttctgttgcccaaggcgtcctgccagcggagtaatagattgctcgatcacggcaatcatcgactgatacagagaactcatttgaacacctcttagtgcgccgcggcgatcagcgacagggcataattcagaacgttatctccccgctgcattccgtaatccatcgtatcgataggctggacgggaatattcaggggagcggctttctcgctaagcattttcagcatgtatttgacctgggggccaagcagcaccacctggtattgtggaaactgcatatcaaattcggcaacgccataggcgtcaatctgcaccggcaggtcgcgttcctttgcggcatccaccattttcctcaccagcaggctggtggacatcccggcggagcaacacagcataatcttgtacatcgacggctttcctcatatgtaaaaagttattgcgaggatgatttgatatcagacggaaaccggtttccatttataaaaaacagaactgtgagcgcggtcaataactcaccgttagcgggcttactaattagatttcgctcacaaaataatgtcgatttggcgtggttttttgccgaaatggaaaatcggtttccaaataaaaaaggaaacggctatactgccgctggttataattgaagcgattcaggacacagcgttacaggggctaagccgcacctgccaggggaaaaaagatgtcgacaatcaatgatgtatcacggttagccggggtatcgaaagccacggtttcgcgcgtgctgagcggttcgcgcggggtaaaagaggccagccgccaggcggtgcttcaggcggcggaaacgctgaactaccggcccaatatgattgcccaatccttactgagccagtcgacgggctgtatcggcgtgatttgcgcgcaggacaacatcaatcagaccaccagctatctctacgccctggaaaaacagctcagccagcatcagaagcatctactgctgcgcttcgccaataaccgcggcgacgtattaagcgcgctggatgaactcacctgtggcctgtgcgatgacgtgctgatcatcggcgcgcgctttctgctgcagatcgagcgccccgatgtggtgctgattgattgtctggaaagcgatggcgagaacagtattcagtttgatcacgccttcgccgcggaaaccgcctgtcattatctgattaatcaggggcggcggcagattgcgctgatccatccgcaggggagcggctttgccgatcaggtgctgctgggctataagcatgcgctggagaagaacttcctgccgtttaatcgcaacctggtcttcctggactgcgcctcgtcgtcggtggcggtgcaggagttgatgaataacgccactaccctgaactttaatgcgctgttggtgagcgatgaactgcaggcgcagcgggtagtgccgcagctgcaggcgtttaaccgcgcggtgccggaaaaagtaatggtcttcagtctcgcgggttcgctgcagatgccgggtattccgaccatcccggcgattgagtattcgatggatgcgatggcttcgcggatcgtcaactggctgatcgggaaaagcccgcagcccggcggcagcctgctgcgcggcgacttaattattccctaatatcgggccaggttacgggtcgcgcatttagcgcgtgagtttgattaactggcgccacgcgcggttatgcagcgtgaacaacagcatcttataaaaggcggtggaatggatacagacgccgctgagcagcaacataatgacgcccaccagtgccgctgttagattaactcccgggtaagaggcgtcactcagtgcgtaaagcaggtagaccaccgttaataccagactcatcaccgctaacataatatgcactcgcacggcgcgcatgctgcctttgccgatcataaacatcgtgatgccgttgataccagcgatcagcaacgaaatcagcactacccacgcaaacacgctttcggcaggctgatggagtacgctcaggatgcagtagcctaaccacaactgcggaatagcaagactgatagttattccgagcgtgctaaatgctgccgggatccccatggtatggattcctacaggcgcccccatttctgcggcaagctgtgccttcaactgttgcaactgcatagtgctggctttgctcatgctgagcgccacgtcgtgacagtgctgcaggcggtgggaaaattttttaaacatatgagtatcctgcatttagctgggggagaacgattgcaacagccccaccacatagcgtccagactggattgtgttctgtgggttacgaatggtccctgtcagcgaactgccaacaaaggtcgacgcattggtaaatgcacccattaattcacgttgcagtgatttttgtagagcttcgctcgggaagcgtttcgggtaaaccccggcgcggatcgcggccttcacgccagaattggaaatgccagggttctgtgctctgattattgcttcagtaatgcgtttccgctcagcgcgattcagactatggaaccactcaataactttacttgaggatgccgccttcatcagcttgtaagtttctacagtgcttctgagtgcagttccagctgcagccagcgaaatgacatctagtactgttgtggtggctacgtaccattcctggctgtccagccaggcaacatctgagccgtgctcgttgtgtagagctagtagtcttccggcaccaatcatacattgtgcgccagtagccaacgtgccggacaagcttatcgcggcgatcaccccagaacctcctgcagtaaaaggtactgctgcaccagctccaaacgccataatcagcgtaacgagcatagcaccacaggcgaagccggtagaggtaatttcagttgccagtgatggggttgctagcgtagatactatggctttttctgctacgggttgttttaattcgggtactttgcttattaccacatgactaacggtactttgattagcgttggcgatacggcgcgaagggcgcactagccagcgctgcttaccatcatcgaaaataataccgacgtggtaaaaattacgggtacagtcgagtttctctgccagttttttaaaatcgatatcagctccggtctgtaggccaaggctgcgagagaaagaataatttggcagagtgctgtcaggtgacagcagaccggggaagttcattagtaggctccttcattccttgaggataaatggtacttgtcacctaatgccatagtaataaaaaaatagtagagcggcttattgggaaataaaaatattcatctaattgtgatttgctacagtgtctttatttgcttcgcgccaacgcagggtggcatgttttttcagctcagcttcaagcgctgcggctaatgtagcgctcatatttataccggcttcgcgcgcacgatcgagtaaatcccgttcgagggcgacggtcactttttgagttttacgttttacagtcatggttaaatctccaatgaaccgatatgtggagcatacgcctatactgattcataaggaatacggtgagggtaacgccctcatgggacgtaaagcctgagtccggcgaagtaccgaactcaggtgaggataatttggagtggcaacggttttcctgataattcagcccgttatttctccgggcagcgaattttatcaatggcggccagatagcctttttgattattgcgctctttcgccagcgtcgcttcgcgaacgtaactctggttgtctttcgaggcgaggattttattggcgaaatcggtatcgctgagggtgctcgccggggcgcatttttccttcaccgctttcaacacctgctgtttttgctgctcaaactgcaggctttgcagcggcgattcggcccacgccgcgctggcgctaagggcagtaaccagacacaacatccaacacgctttcatggcgcttctccttcacttttcgcttcagtcaactatatgcgcagcaggtgaattgcgcaaatgttagacattttttattgtttaaaatcagacgattgctattacgccgcacgtactcgccgccgggaatccaccgcgataagaatgaccgaagagagaatcaacagcgtccccagccagtccggcagagtaaaggtaatgcccaacagcaatagagagagcagggcgctgctcagcggctcggcgcagctgaggatcccggcttttgcgccaccaattttctgagcgccgttgagatacaggctgaaggtcagcgaggtgccgatcaccacgagatagaaaaacgcgagcagaagacggccgttcactacaaagttcgcgctctggctgccataaaacggcaacagcatcgccccgccaatcagcatgctccagccgacgatcggcagcgtgccgtagcgggcgataagcgttgagggataggtggtataaaacgccgccgcgaaggctgaggcgatcccccagaacagcgccgccggcgagatggagagcgaggttgggttgccgtgggtgaccagcaggaaggtgccggcaagcgaggtgccaatcgccagtagcacaaagggactgggccgcgccttacgcgccagcgcgaaccaggcgacgataatcgtcggcgacaaaaactgtagcaccgtggcggtggcggcgttcgacttctcgatagtcatcaggaaggtgtactgcacggttaacgcgccgaccagcgagaaaaacagcaggctaagggcatctttgcggttttgcataacgcggaaaattttgtcgccgtgaacgaaggcgagcatcagcaaaatcagcccggcgaacagcaggcggatcatggtcagatagggcgatgacatctgactttgctgcataatgtactgcgcgcagaccccggaactgccccacaggacggcggcgatcaatacgttcaacatccctcttttgctggaacccatttatccctcgcgtgaaatagcgcaaagcaggaatcatagcatggcggcgacgcggcgcgtgttttactgccgacgccactcgcccggcgtcatgccgtagtgttttttaaaggttttcgcaaacgaagcctgtgattgaaaaccgcagcgttcggcaatcacttccagccgcgcctggcgatcgagatgcagcaggcgagcggccatcgccatccgcagttgcgacagccacgcctgtggcgtcagatgatagacgcgggcaaaatggcgggcgaaggtggcgcgcgataaaaacgcccgcgccgccatgctctcgatagtccaaggctgttccggcgcggccagcaccgcgagaacggccggcatcagccgcgcatcgctcatcaggcgcaacaggccgcccggcggctcctgcgcgccgagcagggtacgtaacagcagtaccagcagcgtatcgccaagactgcgtacgatagcgctgccgccgggatgttccgccaggctttcgcgtaccagcacgttaagcaaaatatccagttccgggcaatcttcgcgctcatcggtatgtaaatggatcagcgccgactcttcggcgaacagccagttaacgtgcgggccgaagtaaaactcgccgcacagcatctccagcgcatcgctctcttcggcggtgcggacttccgtcagcgtgccgttaaagcggtgggcgacgggcagtacctggccccactccaccaggctctccatcagatgcggcgaaccgtgcggcagcaggatcacgtcgccggcgcgcatgtggcgggtttgatgaccaacggttaaccgtccttcgccgcgcaacacaaagtgccacggcaccacgcccgctcgcatttgatcgtgtccggcctgccagcggccgccgaaacggcaatgaagattcacttcgcaacgtggggccagcagcgccaacagatggctcaaactatccatgcgactcctgagacgataagacaaaaaaatgagacgaagagcgccagtctagcacgtcgccgaccactaagatgtctccattgccacaacataccctcaaacaacaggagtacaccatgagccgtttagccgatatccgtgaacaagatgccaccgggaaagccgccgatattttcgccggaattaaaaaagcgatgggtaaagtgccgaatgcctatctgaccatcggcggccactcgccggcggcgctccagcaggcgctggcgcacaacgcgatgctgcataaaagcagccttagcgcgcaggagctggaggcgattaatttatcggtcagcgaagcgaccggctgtgattactgcctggccgcccataccctgatggccaaaaaagcgggcttcagcggcgagcaaatccacgccctgcgccgcggcgagtatacggaagatgcgcgcctggacgcgctggtgaaattcgcccaaaccctggtgaccaccaccggtacgctgccggaagcggatgtcgccgcgctgcgtcacgccggttttagcgaccagcaggtgattgagatcatcagcgctgtcagcgccatcttgttcaccaacatggtgaaccgggttaacgacacggtagtggacttcccgaaagccgattaacccgtcgtcgcgcgcctgtttacagtcccaattcgcttagccccggatgatcgtcagggcggcgaccctggggccagtggaacaggcgctcgctttccgcgatcggcaaatcgttgatgcaggcgtagcgcgtggacattagcccgtgctcatcaaactgccagttttcattgccgtatgaacgaaaccagttgccgctgtcgtcgcaccactcgtaggcaaagcgtacggcgatgcgattatcctgccacgcccaaagctccttaatcagccggtattgcagctctttacgccattttcgctgcagaaacgccacgatttgcccccgtccgtggacaaattcgctgcggttgcgccattcgctatccacggtataagccagcgcgactttttgcgcatcgcggctgttccagccatcttcggcggcgcgcaccttctgcacggcgctatcgcgggtaaacggcggtaacgggggacgttgttcgctcatcaaaactctccttttggggataattgttgctgcaggcgctgattctcctgctccagttcatgaatacgctcttgcaggctctggctgtattccgcgacctgctgtgcgctgtagcgcggcgtaatgtgctgcgggcagttccagtcaaaagcctgcagatgaaaacgaaacaggcgttcgatgctggcgcgatagtttgtcggcgtcactaatgccagcagctcaggctgctcttccgccaccagcacctcgacggtggcgtagattttcagcctggcacggcgcgggtaatccatcaaaaacaggcaggcccggtcgctgccgcgcaggttgccggtggtgatgtactggcgattaccgccgaaatcggccatggccagcgtggtgtcatccagcaggcgcagaaaacccggcgggccgccgcgatgctgaatgtagggccagccgctttgcgacaccgtcgccagataaaaactgtcgcgggtagcgatcatcccctcttcgctggcgccgaagcgatccgcctgacggcggctgtgcggcgtttgccacagctggtcgctgcccatttcatgttgcacatccatgacatccggggtgatagcgatatcgagaaaggttgctgtcataacgcctcctgaaggtagggggctatcatggactgtgctgtgaaaaatgataatactgcttatctggtaatcatctttccgaaaagcgggagaataatggaccgattaagcgctatggcgctgctggtgaaagtcactgaactgggcagtatgtcggcggcggcgcgggcgctgaatacgccgttgactaccgtgagccgtaatatcggcgagctggagagcgcgctgggagtccgtttattgacgcgcaccacccgtaaactcaccctcaccgatgccggcgtcgattatgtcgccgccgcgcggcggatcctcgaagaggtggaaaacgccgaacgccgggcaacgggtgaataccaggaaccgaagggcgagctggtgatctccgcgccgacgatgtttggtcgccagcacgttctgccagtcattagtgaatttatcgcccgttatccgcaaattcgcgtacgtttgttacttagcgacagtaatgccgatctggtcgacgaccatatcgatctggcggtacggattggcgaactggctgatagcagcatggtggcgacccggctcggcgcgatgcgcattgtcgcctgcgcccatcccgcgctgttggcgaaatacggcgaaccgcagcggccgcgcgatctggcggcgctgccgatcatccgtattgaatcgccgatgccctatcgcggctggcgctttcgcgccgttgagcgcgaggaccagctcattcatctgccgccggtgttagccatcaccacgccggagagcgccgccgatgccgcgcggctgggcgttggcgtggcccgcttgctgcactaccaggcgctggatggcctgcgctgcggggaactgcgtctgctgctggaaagcgtcgagccggagcccgcgccggttcatttgttatataccgcgcgggagctggctccgcttaagctgcggaaatttatcgattttgccgcgccggcgctgcgccagtccttgctacgcattgccggggccgtttaatgcgccgcggttttcagcggcgcctccttcaatagccaggaaaggacaaacgcgacggccataatgcaggccgccatcaggaatgccgcatggatcgccgcgccgaaggcgtcgagataatcgagacggatcgccgctggcagatgctgtaccgccaccgggttcatggctggcggcagcaccgcgccctccggcagcagtttctgcaggttattttgcagcacatgggtaaagaccgcgccgaacaatgccacgccgatggagccgccaatcgagcggaacagggtcacgccggaagtggcgacgccgtacatctgcgccggcatcgcgttctgtaccgccagcaccagtacctgcatcaccagccccaggccagcgccgagcacgccggtaaacaggtataactgccacattggcgaatgaatggtgatgcgtgtcagcagcaccatgccggtcacgccgagtagggtaccgataatcgggaaaattcggtatttcccggtgtggctaatcacccggccgctgatgatcgaggtcagcaacaggccgcccatcagcgggattaactgtaacccggcctcggttggcgtcgcctctttcaccacctgcagatagagcggcaggaaagtgaccgaaccgaacagcgacatgccgataacaaagccaatcagactacacagcaggaagctgcggttgcggaatagcgacagcggaataatcggctcggcggcgatccgttcttcgtagataaaaccgatgatccccacgatgccgaaggccagaatgcaccacagctgcgggtcattccacgcatggacgctgccgccttccgaggtaaacaggatgatgcataacagcgccatgctgaggtaaatcgcccccagccagtcaatctgatgctggctacgtttgttgctactgtggaataccgcgccgatgaccagcaacgcgaacaggcccagcggtaggttgatatagaaaatccagcgccatgaggcgtgctgtaccaggaaaccgccgatcagtgggccgataaccgtcgccaggccgaagacgccgccgaacagtccctgatagcgtccgcggttggcaggtgggataacgtcggcgacagccgccatgctgatcaccatcaggccgccgccgccgagcccctgtagcgcgcgcatcagtaccaattgcgtcatgttttgcgccagtccgcagagcgcggaaccggcaagaaacagcacgatcgccacctgcagcacgattttacgcccgaacagatcgccgaatttaccgtacagcggcaccacgatggtcgagctgaggatataggcggtaaccacccacgagagtttatccagtccgccgagctcgccaacgatagtaggcaaggcggtggagacaatggtctggtccagcgccgacagcagcatcaccagcagcagggcgctgaacagcaggcggattgagggcgccggttggtttgcgacttcagatgtcattgcatcactcgcttgaaattaattaaatgcataattaatatttagtgaaatgatgaatcgggtcaagagatcgccaacatatgccagcacaaaaagctaatgaagcgccgcgccgccccggtcggccacgcggtaaaaaaccgggaaccgctaaccgcgagcagttgatagatatcgccctggcgctgtttgctcgtcacggcgcggcccgcgtgtcgctcaatgccattgccaaagaggccggggtgacgccggcgatgctgaattactattttacgtcgcgggaagcgctgattgagaatttgctggaagagcgctttatgccgctgcgcaacgatatcagccgcattttcgtcgaccatccgcaggatccggtaacggcgttgacgatgatggttgagacgctggcggacatggcggagcaaaatgcctggttcgcgccgctgtggatgcaggagatcatcggcgagatgccgatgctgcgccagcacatggatgcgcgcttcggcgaggagcgttttcaggtgatgctggagacggttcgccgctggcagcaggaggggaaaattaacccggcgctggcgccggaactgctgtttaccacggtgattagcctggtgctggtgccgttctcgcgcatccatagcgacccgcgcttacaggcggtaatccggcagaccattgttagccacgcgctggcgttaatgggccacggggtcggcggttaaggcgtgatgttgtgttaattcagatgctgatactgcttctgccttatggctctcctggcgcagggattttcccggaggcggcgcgttgcgccttgtccgggctaccaaagaactgtcggccggataaggcgtagccgccatccggcgcaaaagtcgcgccttatccacggttatcgttacagtgtcttcgataaatagtggcgttgcatacccgcgtgcgggaaatcgggcagcgacatctgcaattgatagcctaatttctgataaaacggcagcgcctggaagctgaaggtatcgaccaggagatgactgcagcccaacgcctgcgcctgccgttccgcttcctgcataagctcgcggcccagaccgttgccgcgcgtcgcttcgctcacccacaggtattcgatacacagccagttgcctttgcgtttggcgataagcccgccgcgcatcaccgcttgctcatcgcgggagtaaatgcccagatcgccaaactgatctgcgtcgagatactgctgattatactgccgtaggccggcaaacaattcttgttgatcgtcgggattaatgctttttgtaattattagagccattaagtttctccagttgcacaggctatcgttatattttcctctcctgactttcacaaaatattcttattttctccattattttttgtcttaattttgaccttcaaagtaagcgaaataacctttccatgactttcgaaagggcgggctgagaatccccacaataataatagtgttaaggaacatctaagctctattgcgatatttccattgagacgaaatgtcacagcgcccctcttttcctcgcgatttaattcacggggggacgtcttacatcttgagaaaataaaatgaaacacatcatagcccccatcgcgatagcattatttctcctgagcggatgcgataatgtgcagacaactgcgccgcaacaacccacgccggaggtgggaattgttacgctgcaagcccagccggtgccggtggtcagccaactgactggccgcactaccgcctcgctcagcgccgaagtgcgcccgcaggtcggcggtatcattcagaagcgcctgtttaccgaaggcgatatggtgaaggccgggcaggccctttaccagatcgatccctccagttatcgcgccacctggaacgaagcggcggccgcgttgaagcaggcgcaggcgctggtggtctctgattgccagaaagcccagcgctacgcgtcgttggtcagagataacggcgtctctcgccaggatgccgacgacgctgcctccgcctgcgcccaggacaaggccagcgtggagtcgaaaaaagcggcgctcgagagtgcgcgcatcaacctgaactggaccaccgtcaccgcgccgattgccgggcgcatcggcatctcctcggttacgccgggcgcgctggtctctgccgatcaggataccgcgctggcgacgatccgcggcctcgacaccatgtatgtcgatctgacgcgatccagtgtcgatctcctgcgtttacgcaggcagagcctggccagcaacagcgataccctcagcgtgacgttaacccttgaagatggcagtacctatcccgaaaaagggcgtctggcgctcaccgaagtcgccgtcgatgaatccactggctcggtgactctgcgcgccatcttccccaacccgcagcacgtcctgctgccgggaatgtttgtccgcgcgcgtatcgatgaaggcatcatgaacgacgcgatcctcgcgccgcagcagggtatcacccgcgatgccaaaggcgacgccacggcgctggttgtcgatgccgacaacaacgttgagcagcgtaccgtgcaaaccggcgatacctacggcgataaatggctggtgctgagcggtctgaaagcgggcgacaagctgattgtcgaaggcaccggtaaagtgtcccccggacaagcggtgaaggccgttgccgtcaaaaataacggaggcaatgcctgatgttctcccgtttcttcgtgcgtcgcccggtctttgcctgggtgatcgctatccttatcatgcttgccggggcgctggcgatccgcacgctgccggtgggacaatatccggacgtcgccccgccagcagtaaaaatatccgcgacctatactggagcttccgcagaaaccctggaaaacagcgtcacccaggttatcgagcagcagctcaccgggctggataacttactttatttcacctccaccagcagttcggatggtacggtaagtattaccgtcacctttgagcagggaaccgatccggataccgctcaggtacaggtgcaaaacaaagtgcagcaggcggaatcgcgtctgccgagtgaagtacagcaatctggcgtaacggtagaaaaatcgcaaagcagcttcctgttaatcctcgcggtgtatgacaaaaccaaccgtgccaccagttccgatatctccgactggctggtcagcaatatgcaggacccgctggcgcgcgtggagggcgtcggcagcctgcaggtattcggcgccgaatacgcgatgcgcatctggatggatccgaccaaactcgcctcttactcgttgatgccttccgacgtacagtcggcgattgaggcgcagaacgtgcaggtctccgcgggtaaaatcggcgcgctaccgtcgtccaatgcccagcaattgactgctaccgtgcgcgcgcagtcgcggctgcaaacgcctgaccagttcaaagcgatcatcgtgaagagccagtcagacgggtcggtggtgcgcctgagcgatgttgcgcgggtggagatgggcagcgaggattacaccgctaccgctaatctgaacggccaccccgccgccgggattgcggtgatgatggcgcccggcgccaacgcgctggataccgcgacgctggtgaaaagcaaaatcgctgaattccagcgtcagatgccgcagggctacgatatcgcctacccgaaagacagcaccgagttcatcaaaatctcggtcgaggacgtcattcagaccctgtttgaggcgattatcctcgtggtctgcgtaatgtatctgttcctgcagaacttccgcgcgacgctcattccggcggtagcggtaccggtcgtgttacttggcacctttggggtgctggcgctgtttggctactccattaatacactgacgctgtttgccatggtgctggcgatcggcctgctggtggatgatgccattgtggtggtggaaaacgtcgaacggattatgcgcgacgaagggctgcccgcccgcgaagccaccgaaaaatcgatgggcgaaatctccggcgcgctggtggcgatcgccctggtgctgtcggcggtattcctgccaatggcctttttcggcggttcgaccggggtaatctatcgccagttctcggtgacgattatctcggcgatgatgctgtcggtggtcgtagcgttaaccctcactccggcgctgtgcggcgcgctgctaagccactccaaacctcatgacaaaggtttcttcggcgcctttaatcgcctgtgggggcgtacggaagatggctaccagcgtcgcgtactcggcggcctacgccgcggcgcggtgatgatgggcgcttacgccttgatttgcggggcgatggcgttggcgatgtggaaacttccgggcagctttctgccggtggaggatcagggcgaaataatggtccagtacaccttgcctgccggggcgacggcggtgcgtaccgccgaggtgcgccgtcaggtgaccgactggttcctcaccaaagagaaagccaataccgaggttatcttcaccgtcgacggcttcagtttcagcggcagcggtcagaacgccggaatggccttcgtctcattgaaaaactggtcgcagcgcaaaggcgacgaaaataccgcgcaggccattgcgctgcgcgccaacaaagagctgggcgcgatccgcgacgccaccctgttcgccatgacgccgccatcggtggatggccttgggcaaagtaatggcttcactttcgagctgatggccagcgggggtaccgatcgcgatagcctgatgaagctgcgcagccaactgctggccgcagccaatcagagcggcgaactgcagtcggttcgcgccaacgatttgccacagatgccacagctgcaggtggatatcgataacaataaagccgtctcgctggggctgtcgctcagcgacgtgaccgatacgctctccagcgcctggggcggcacgtacgtcaacgactttatcgatcgcggccgggtgaaaaaggtctacatccagggcgagagcgacgcgcgcgccgtgccgtccgatcttggtaaatggtttgtccgcggcagcgataacagcatgacgccgttcaccgcgttcgccaccacccattgggaatacggcccggaaagcctggtacgctacaacggctcggccgcctttgagatccagggggaaaacgccgcgggcttcagctcaggtgcggcaatggacaaaatggaaaaactggccgatagcctgccggcgggttcctcctgggcatggagcggtatttcgctacaggaaaaactggccagcggccaggcgatgagcctgtacgccatttcgattctggtggtgttcctgtgcctggcggcgctgtatgaaagctggtcggtgccgttctcggtgatcatggtcatcccgttaggcctgcttggcgcggcgctggcggccacgctgcgcggcttaagtaacgacgtctatttccaggtggcgctgttgacgactattggcctgtcgtcgaagaacgccatccttatcgttgaattcgctgaatccgcggtggatgagggctattcgctctcgcgggcggcgatccgcgccgcgcagacccgtctgcgcccgattgtcatgacctcgctggcatttatcgccggagtactgccgctggccattgctaccggcgccggggccaacagccgcgtggcgattggtaccgggattatcggcggcaccctgacggcgacgctgctggcggtgttcttcgtcccgctgttctttgtgctggtgaagcgtctctttacccgcccacgtccttctcaggagtaagttatgtttcgtttgagtttaatgtttatcgcactcctgaccgcgggctgtgtctctcttgacccgcactacgagcgcccggccgcgccggtgcctgcgacccttcccggcgcgcacggcgaatcaacggcggtggtcggcgactggcaaaaagtggtcaatgatgcgcggttaaaaaaagtggtcagcatcgcgcttaatagcaaccgcgatgtgcaaaaggcattggccgatattgaagccgctcgcgcccagtatggtgaaacgcgcgcatcgttgtttcccaccgtcgatgccgagctgagccatacccgcagcaaaacgatcgccagcggcctaagttctacctcgcaggctgacggcgcggtctcgagcttcgaactggacttgttcggcaagaaccagagcctgtcgcgcgcggcgcgagaaagctggcttgccagcgaattcaccgcgcaaaatacccgactgacgatgattgccgatttgaccaccgcctgggtgacgctggcgacggataatagcaatctggcgctggcgcagcagacgatggatagcgcggagaactcgcgcaaaatcgtcgctcgccagatggcggtgggcaccgcctccgccggtgatttaagttcggcggaaagcgtctatcagcaggcgcgagccagcgtcgccagctatcgtacgctggtggcgcaggataaaaacgccattaacctactggccggggaaaccgtgccggagagcctgctgcccggtacgctggagagtctgggggataacagcatcacgctggtgccggcgggggtatcatcatcggtactgttgcgccggccggatattcaggaggcggaacataatctcaagagcgctaatgccgatatcggtgcggcgcgagcgaactttttcccgtccatttcgctgaccgccagcgccggggtcggcagcgattcgctatcgtcgctgtttagccatggcatgcaggtgtggtcgttcgccccgtccatcagcctgccgctgttcaccggcggcagtaatctggcgcagctacgctatgcgcaggctgagaaaaaggggctgattgccacctacgagaaatccattcagagcgcctttaaggacgttgccgatgcgttggcgcgccgggaaacgctgagtgaacagctcgatgcccagcagcagtatgttgccgccgagcagaagtcgctggatatcgcgatgaagagttatcaggccggggttggcgattatctgtcggtgctgaccgcccagcggacgctgtggtcggcgaaggcgacgctgctgtcgctgcagcagaccgacctcaataaccgcattacgctctggcaatcgctgggcggcggcgccagttaatgttcctcttcggacgcgttatagcaccttaatccctcctggcacatgcgttaaccccaggttgcggtaataaaatattccacctttattaccgcaatatctctggctatacctacaattctcctattatcccaagcgtattaatcgtgatactcttcacatgaatggaataaaaaattccttatactgcgcgcaactgagaataacgaggtttttatgagtatcgacctgagcaaactgctgaccgagcgacgcaacgccaacagcgccaacattgacaccctctccactgtcgacatgctgacggtgataaaccaggaagatcagcaagtggcgcaggcgataacgccttacttgccgcagatagcggaagtcgtggataaagtggcggcggcgctgcgggccgggggacggctgatttacatcggcgccggcacgtcggggcgtttgggtattctggacgccagcgaatgcccgccgacctttggcacccgtccggagcaggtggtggggattatcgccggcggacataaagcgattctgagcgccgtggaaaacgtggaagacaataaagcgcaaggggcgatggacctgcagaaccttaacttcagcaaccgtgatgtgctggtggggctggcggccagcgggcgtacgccgtacgtcattggtgcgatggaatacgcccatagccagaatgcgtttgtcgctatcgtcagctgtaacccgcacggtgaaatggcgcagctggcggacgtggcgattaccccggtggtcggcccggaagtggttaccggatcgacccgcctgaaagccggcaccgcacagaaactggtgctgaacatgatctccaccggggcgatgatccgcatcggcaaggtctacagcaacctgatggtggatgtcgaagcgaccaacgccaagctgattgagcgccaggtgtctatcgtgatggaagcgaccgactgcgatcgcgccaccgcgcagaatgcgctggatgcctgtggccgccactgtaagacggcgattgtgatggtgttggctgacttaagtgctgcagaagcgcagtcgctgctggcgaaaaacaacggttatatccgcaaggcgctaagcaacacttgagcgccgacagacaggtaacaggcaatggcaaaaataactaaagagatgatagcgcggatcctggctcacgtcggcggggccgcaaacgtggcgcaggcgggtaactgcatgacgcgcctgcgcttgaccctgcgcgatgaaagcctggccgatagcgccgccattcgccagattgacggcgtgatgggggttatcgtcagcgatgaacagttccaggtggtattagggcccggcaaggcgcagaccgccgcggaaatgatgaacggcctgatggaagcggcgccgcaggcagccacctcgctggcggatgtggcagcggagaaaaagcaggcgttaaagagtaagcagaccagcggtgtacagaagtttctcgcgaagtttgccactatttttacgccgctgatccccggctttatcgccgtcgggctgttgttaggcttcgccacgctggcggaacaaatcttcgtgctggagaacgcgcatcctaacgccagcctggtggcgctgattggttatatgaaggtattcagcaaagggatgtttaccttcctgagtatcctgattggctataacgctcagaaagccttcggcggttcgggcgtgaacggcgcgattatcgcctcgctgttcgtgctgggctacaacccggaagcgaccagcggattctacgccggaatttcgaccttcttcggccatggtatcgacccgcgcggcaatattatcggcgtgctaatcgcctcgattcttggcgcgtgggtggagcgtcaggtgcggcggataatgcccgctaacctcgatatgatccttacctcggcggtgacgctgctgattatgggcgcggtgacctttacggtgattatgccgattggcggctggctgtttaccggtatgtcgtggctgttcctgcatcttaacggcaatccgtttggctcggcggtgctggccgggctgttcctgctggcggtgatgttcggcgtgcatcaggggtttgtgccggtctattttgcgctggtggatgcgcagggctttaactcgctgtttcctatcctggcgatggccggggccgggcaggtgggcgcggcgctggcgctgttctggcgcgcgaagcgcgattcgctgctgcgaacccaaatcaaaggggcgattattccgggcttcctcggtattggcgaaccgctgatttacggcgtgaccttgccgcgcatgaaaccgtttatcaccgcctgtatcggcggcgcctgcggcggtttcttcgtgggcctgattgcctggctggggctgccggtgggcctgaacacggtgtttggcccgtccgggctggtggcgctgccgctgatgacctccggtagcggaatttatgccgggatggcggtgtacgccggcggtctggcggtttcgtatttatgcggttttgtcctcacctggctgttcgccagtaaaaacgttgacctgagttaagcgtatttccccggatatggttgggcattcggccggtagccccggtaagcgtaagcgctaccggggaaggcgcttagacgattttcatcttattgataccttttcgtgtttaaaaatcgagcacaaaatcgttatagttttgctcgaaaaataataatgattttccatggactgatggggtactgatgatgaaattgcgtttacgcacggcggcggcagtgatgctggctggcctgctgttagcgggctgtgaccagaagaatgacaatgccaaacacataaaagtcggcgtgattaacggtgcggaacaggatgtggcggaagtggcgaagaaggtggcgaaagaaaagtatggcctcgacgtcgagctggtaggctttagcggctcgctgttgccgaacgatgctaccaacgccggggagctggatgccaacgtcttccagcatcgtccctatctggaacaagacaacaaagcgcacggctaccacctggtggccatcggcaatactttcgtctttcccatggccggctattcgcgcaagattaaatccgttgccgatattaaagatggcgcgaccatcgccattcccaatgacccgaccaacctcggccgcgcgctattgttattgcaaaaagagcaactgattactctcaaagcgggtaccggcctgctgccgacggcggtggatatcaccagcaacccgcgaaacctgaaaattatggagctggagggtgcgcagctgccgcgggtgctggacgatccgaaggtcgatgtcgccattatcagtaccacctacctgcagcaaaccgggttatctccggtacgcgacggcatctttattgaagacaaaaactcgccgtacgtgaacatcattgtggcgcgtgaagacaataaagacgccgaaaacgtgaaagagtttatgcagtcgtaccagtcgccggaagtggcgaaggcggcagaaaccatcttcaacggcggcgcggtaccgggctggtaatcatctacgctgcgccatcaggtgcagcagcggcaccagagacagcccgtccggcatttcgccgcgggcgatcagctggtttatctcctcgaaggtaaaccagctggtttccatcacttcatcctgatctgcgtccatgccaacccagcttaaatcggtggcgagccaggtgataaacagctggtcgctgctgccgtatgacgggttgtagcggatgatttcctcagcgtgttgcgcttgccagccggtctcttcgcgcagttcgcgcagcgcggcgacggcgggttcttcgccttcatcgacgccgccagagggaatggcccacaccaccttatcgatcagatagcggtagtggcgaatcagcagcactttgtcgtcctggagcgccacaatcccgaccgccgggcgtgggtagtgaatggaataaaagtcacgccgctcgccgggggcgacatcaatacctaccttgcgcatgctgaaccacggcgtctcggcgatgacctgtggattgtgcatatcggcggcggttagtttcttcttcatcctgccattcctgtagaaagtttaatcttcagaacaacatagccggctgcgattggcaaccgtcgcaggttggcccgattccatcgatcattgcccaaatgcccatattgcgccaggctggtacgcaatacgatgttcgtcagattaccccacagaggaacgctaacatgaacatcactcatatccgtaatgctacacaggttattgaatacgcaggtaaaaaattcctgatcgacccgatgctggcggacaaaggcgcctggccgggatttccaggaaccgcgcgcagcgaactgcgcaatccgctggtggcgctgccgtttccccgcgaaaaaattatcgacgtcgatgcggtaatcgtcacccatacccatgacgatcattgggacgaggcggcgatcgcggcgatcccgaaaatccttccggttttcgtccagcatgaggccgacgccgcgctgctgcgcagccagggatttcaggatatccgcctgctgtcggcagacagtgaatttgccggagtaggcctgcagaaaaccacttccgggcaacatggcagcgaccgtacctacgcggtaccggcgatggctgaacgtctgggcgaggcctgcggcgtggtgttccgtcatccgcaggagaagacgctgtggctggttggcgataccatctggcgcgatgagattgaagccgacatgctgaagctgcgcccggatgtggtggtgctgaacgccggctacgctcacgttatcggctttggcccgatcatcatgggcaaagaggacctgctgaaggcgcatttcgccctgccggaagcgaaaatcatggccatccacctggaggcggtcaaccattgtctggtgagccgcgaagagatgcgccagtacgtcgcggataatcagattgccggggtagtcagtattccacaggatggggaaaccgttgtttattaacctgctcaaggggaagggatgatgacattaaccgacgtggcgattgtcgccgtagagggctttagcccgtttcattattccgtcccctgtatgctgtttggcgatacggtctcggaaaccaaacgttttaatctgcagatttgcgccgaacagccgggattactcagcgcccgcgacggcttcgcgctatacgccagcggtgattttaccgcgatggaacaggcggatatcgtggtggtgccctactggggcgaggtcaaccagcgcccgccgcaggcgctgatcgcgagtctgattcgggcgcgcgataacggcgcggaaatcgtcggcctgtgcctcggcgcgtttgtccttggctacgccgggctgctcgacggtaagcgggcggcgacccactgggagttcgagcaggatttccagcgcctgtttccgcaggttcagcttgatatcaacgccctgtacgtcgatgaccagaaggtgattacctcggcggggaccgccgcggcgctagattgctgcctgtatatcattcgccagcgttttggcagcctcgccgccaaccagatcgcccggcggatgatcgtgccgccgcaccgcgagggcggccaggcgcagtttatcgcccagccggtgccgcgcaacacccgcgatgcgcggattaattgtctgctggattatctgcagcagcacattgccgagccgcataatcttgattcgctggccgaggtggtggcaatgagccgccgtacgctgacccgccatttcgcccgggcgaccgggatgagcattgccaactggttaaccgccgagcgcctgcgccgcagccagagcctgctcgaggcgggggatttaccggtcgagcaggtggcggaagcggtgggctatctttctgccgtaacctggcgccagcagtttaaagcacgttttggcgtcagcccgacggagtggcgccggactttccgccgcggcgtttagtcggcgagagtcgaactgtcgatcacgaagcgatatttcacgtcgcccttgaccattctttcccaggcttcgttgatctgatcggcgcgaatcagctcgatatcggcgacgatgccgtgttcggcgcagaagtcgagcatctcctgggtttccgggataccgccgatcattgagccggcaatcgagcggcggcggaagatcagattgaacacttccggcgatggatgcggcgtggccggggcgccaaccagggtcatagtgccatcacgtttcagcaacgtggtgaaggcatcgagattgtgcggcgccgccacggtgttgaggatgaaatcgaaacttttgacgtgggccgccatttcgtcttcgttgcgcgacaccacgacctcatccgcgcccaacgctctggccgcgtcgcgcttggattccgaggtggtaaaggccaccacgtgggcccccatggcgtgggccaacttgatccccatatgccccaacccgccgatgccgacgacgccgacttttttgcccggcccggcgtgccagtggcgtagcggcgaataggtcgtgatcccggcgcacaacagcggcgcgacggcggcgagctgcgcttcgggatggtttatccgcagtacgtagcgttcattgaccacgatctgctgtgaataaccgcccagcgtatgccctggcgcgtcctgggtcggcccgttataggtcagcaccatatggtcacagtagttctccagcccttcagcgcactcctcgcactgtttacagctatccaccatacagccgacgcccaccagatcgccgacggcgtaacctgagacggcatcgccgaccgccgtcacccggccaacgatttcatggcccggcacgcagggatacagcgtcccggcccattccgctcgcgcctgatggagatcggaatggcagacgccgcagtatgcaatagcgatctgtacatcttgtgggccgggttcgcggcgggtgatagacatcgattcgagcggctggctggcggagtacgtacctatagcgttgatctgcatagcattacctcttgtgcaatagcgtgataaatcaagcggaagggggtgagtgttttttgcgcggcaagggtaagcgtagcctggttagggcaggatgagaaaagcgcagctcaaagggttaaagaaggcgcctcaccggggtgagacgctcgtgatatcaaggcgcgatgggtgtcagataatccagccgcagcggctcggcgagcaggctctccatctggccgataaaggcctggaagtagggctgggcgatatgctcatccagcgcctgctggtcgcgccaggactcacgcatgtagaaggtatccggcgcgtcgcgcagctgaaacagcgcgtagtcgagattgcccggctcctcgcgggttggcagcagcagcgcctgcagcgcgtcgcgcagggcctcggtttgcccggctttcgccttcagaaccgcgataagcgcaatggtgtcgtcgcgcatttagaaaccctccagcacgattttgccgaccgagcgcccggtttccagcttaacgtgggctttttgcagattggcggcgttgatagtgccgtagtgttcgccaagggtagtgcgcagcgtgttatcgtcaatcaacgcggcgacgcgggtcagtagctgatgttgggcgatcatatcatccgtctcaaacattgagcgggtgaacataaattcccagtgcagcgaaatgcttttcgctttcagcggcaccacgtccaggctctccgggtcatcaatcagcgccaacttaccctgcggggcgagcgcggcgatcagttcgttaaaatgctgatcggtattggtcaggctggcgacgtgggtcacggcatgaatgccgattttcgccagttcttcagcgagcggcttgctgtggtcaatgacgtgatgcgccccggcctcgcgtacccacttctggctttccgggcgcgatgcggtaccaattaccgtcatgttggtgagtttgctggccaactgggtgaggatagagccaacgccgcccgccgcgccgacaatcagcagcgtatcgccggcgttaccgccttcctgcacgccaaggcggtggaacagcaattcccaggcggtgatagcggtcagaggcagcgcggcggcggcggcattctccagcgagcgcggtttcagcgccacgatgcgttcatcaaccagctgcagttcgctgttactgccgggacggcccagcgcgccggcgtaccacacttcatcgcccggcgtgaatagcgtcaccgcatcgccaacggctttcaccacgccaaccgcatcccagcccagcacccgcggggtatcggcattaaacccggcgcgcactttggtgtcgaccgggttcaccgaaatggctttgacctcgaccagcagatcgtggccttgcgcctgcggatccggtagatcgatatcgcgtaaaaagggaatgttgctgccgtcggcggcggcctgggtaatggcaatggctttcataggttctccggtctacaaagaggattcatggtgcgaatgcgtcgaggatagaccggtctagcgtcgggaaaaacggcccggcggcgataacagttatataaaaaaagtgaaaatcggcgaatgcgacattggcaagtttcgtttatttcgaatattgtgggtttcgaatattgcgattataatttttacatggccattggagacaagcgcatgactaaactgaaccttccggacccgctggagagtgaacttgcccagcgcgggcagcgtgagctggcggcatacctttctactcatcttgaaacgcagcgtattgcgattgtgggtgaagatgacaaaactcataccattgagttgccaaccagcgctctgactatgctgatggagatccttggggaattggcttgtggcaacgcggtgcagattgttcctgttcatgctgaactcaccacccaggaagcagcgaatatactcaatgtttctcgtccgcatatggttaaactgctggaagcgaggaagcttccatttcataaaactggacgccatcgccgggttctgtttgccgatctgatggagtataaaaaacgtagggaacaggaaagcctggacgcgatgcaagcgctggcggatcaggcgcaggacttagggatgtattaatgcgacattcaccttatccggtgattttagatgcttgtgtattatatccagcacggctcagggatttattaatgcacttagggatcgctggactttatcaaccaaaatggagccgcttcattcacgatgaatggtgcaggaatcttcttataaatcggcctgatatagcacctgaagcgctgcgtcgtaccgttgatctcatgaatgcagctttaccggatgctaatgtaacgggttttgcaggattaattaacggactagttttacccgaccctgacgatcggcatgtccttgctgcggcaatcagagcgaaggctgaaattatcgttacgttaaatcataaagactttccagcagaatcattgcttccatttgaaatcgaaacacttcatcctgatgtattcatatcggacctgtttgaccttaatcatgctctggcgttggaggcggtgagaaggcagcggcagtctctcaagcatcctccaatgaccgtcgatgagttcctggagatgctgctaaagcagggcttgccgatgacggtaaaagagttagccaattaccagtacgccatatagcgatggtcatcacccggaagtattatggtttcatatttgagacccttttcctttccatgtcgcaaatattaatatcactccggcagaataataatattgcgttatggctcaaggtttataccttgactcccgacatcctgcgtgcgatttttcttctatcaaataataaacagagtttcatatttggaacaaaaataaaatcaccgtgctatttaattaagagtttcaccactgagacaaaataataagtcgatattaatcgacggtcttttatcgcttataaaaataaagtgagggatgtgctatgcgtaaaatactcctttcgctgctgctggctgccgtgaccagcgggctggcgctggcggacgacggcaagccgttcccgcatatcggctggcgcagcgcggataatcttgccgggctggatttcggcggcgcgctgcgggcaaattatcgctatgaagactggaaaggcagtaattatcgcaacccgccgcatctgcgttttgatactttccgtatcgacagcagcggcttttatgataattatttctttgatgccgggttctggttccaggatcaccgtaaatacgccatcgaccgcgcttacgtagggtaccgcttcgacaataataataatatccaactggggatccctggcaaaccatttggccttgaaccttatccgcaatttggctggtcctatggtattccgttttatttaggctttggcgtgagcgccggtagcggcgtgaactatcaatatcatgataataactggtcgctggatgtggcctatttcccgtggatggaaccggagaatttgcgctatgcgccggacgttggcgattacgatcggctgaaaaacactatctatccgactcagcatcagcagcataatgaaaagcgggaccaggtgaatgtgcgtattgcgcgggattttcacggcggcggctggaataacgagctgggcggctcactggcgctggcgcggttgcacaaccgcgagaccgacgacgacggcaccttctgggcggcaggcgtgcacgtcatgttacataacgggccgtggcagctgacttcgcagctgattcgctaccaatacgatccgaagaacccggcgggcgtcagcgacgataccattctgatgggcggcaacggcctgacgccggcctacctgatcccggcgaaagcgacgaccgcgtcgctgaacgtcgcccgcgatgtcgacgtgaagtggggcggcgtatcgaagctgcgtttttacaacgactacagcgtgctgtggaaagataaaagcggctggagcgattcgcagatgaatacccttggcgtacaggtctttgcgctgccggtgatgttctgggtcgatctcagctgggcgaagaacgttaatccgtggggcggcgcgctgaacgccaccggctggaccagcacccagtccgagggcagcggcaaatggtactttcgcactaacgttaatattggctattacttctgaggcgggaattttccctgctcgcgctgcgctccgcagggctacggttctgcgccgtctggtagcccgggtaaggcgctagccgccacccggggggttgatcgcgctatcagaccgtaggccggataaggcgttagctgccacccgaggggctagctcgcgctatcaggcatcctgagctactttttaggctctgttttccactgtagcaaaccggcgatatccttttcaccttcggcttcctttaagcgccgctgttgttcagcaaactgactatattccgcctgcgctttttcatcggccattttctgactgactttacctgcgccttgcaaaacctcacggtcgttaaattgcaggaactgatccagcttatcctgccagtcgcgtaaaaagacctgctgacgacgacgggcctgatcctcggcaaaatccagccacatgttaactacgcggttaagctcattgacttcatcctgagtgagataattttttgccaccgtcacatcacacttatgcacctcttcacctttatagttggtcagccccatatgcggctgactggcgtcagcacgttgatgaatgagttcagcggcggtatgcccggtacaggcaaaatgtaacttgttctggattgtttgaaaaaactgcgtggtttctttaaacgacggttgatagtcagccgctaatgcaaaaatctctcgcacccgcaaataaacgcggcgttcgctggcgcgaatatcgcggatacgctccagcatctcatcgaaatagtcgggtactgccgatgaacccacaggcggattcttcagccgctcatcgtccatcacaaaacctttgatcaggtattcctggagcgtctgggtcgcccactggcggaactgcgtgccgcgagaggagcgaacgcgatagccaacagcgagtatggcttcaaggttgtaatggtctatctctctggaaacctggcgttttccttcctggcgaactatccggaatttccggatagttgaattttgagcaagttcaccttcagagaagatattgattaaatgctcattaatagtccgaacgtctttatcgtacagttcagccattgtcgcctgggataaccagattgtgtctgactcaaagcggcattcaacgcgcactttcccatcaccgctggcaaacataatgaactcacctgctggggacgacgttatattttcctttgccatttggtctccgggtcaacctgttcacaacggtagagtatgtcagaagcggggcataaatttcattagacgaacgattaatcttgcgcgtttgcgagcggttatcctgaaagtaaagttattaaggcgtcagacagggtggtggaagaggagattttcgccgttttatcgcccggatcaggcggcagccgcaatccgggcgatttccctgctcgcgctgcgctcagcagggtgaaaatcattagatgaggagtttaggtagagaattgaatgaaggcacagagtagaactaaaatttaattgtccaaggcgttataaccttgggcatatataatagttaacgtaatttctgataaaaattcttacgtactgtacgactaatataactattcaatcccttaccagctcttgccagtgctttcatatgatcaacatcaacttggcctggtcgaatatagttatatagatatagttaattatcacgaaattgcacagtaatagagtcatcatttatctcaaaacaaatgacaccagagtttcctccacggtttttatattcttctatttcatatacttgtaaattaaatgcaattgagtgtgaatgataaccacacaaataaaatgtgtatatgataaagatctccaattgaaatataaatttggttgcttaacacactagtatctaagaggaatttataatgattaaaataatatacttttccggttattgatggagaattagcgttacatactggatatcgacgatgatgaaaggctgaaaaataaaatttatctaccaggtcatcggcaaaaaatgagaaggtcgatccggggaagttgataattgtatatgtttttcattcagttatcctggccaaaatccagctcaaggacagttgcaagtggtgctttcgcaccaaagtcattattagtattacctttgatggagagtgacattaatggtcaaaaacactgctgtttaacctcaatgcgttggttacagtatttggtgttacgcgcttttgtagggtgattgtgaaatggagagtgttcagataaaaagactttggcggaagatcacaggagttgaacctgcccgggaccgctggcggccccaactggatttgaagtccagccacctcaccggagatgacgatcttccgcgcctcgattgctacatggaggcgggcgcattatagctactttcaggcatttaccacatacctaaacgcacttttttactgttaaaactggactttgcagaacagtcttagacaaatccgttcaaaatccatgggttacactttttcacactctttcgggctaccgcgatcacagaaaacaagaaacgtaatttgataacgagatatcgcaattcatcttactgcgccaaaggtttaaaaaaaccgtaaccggtaccaatccgcggtgccgctaagggaatagtgcgcaaatgaaagatcatattctgtccgtcaaagagaaaattggctacggtatgggtgacgccgccagccacatcatttttgataacgtcatgttatacatgatgtttttctacaccgatattttcggtatccccgccggctttgtcggcaccatgttcctgctggcgcgggcgctggatgcgatttccgacccgtgcatgggcctgcttgccgaccgtacccgcagccgctggggtaagttccgcccgtggatcctcttcggcgctatcccgttcggcctcgtctgcgtgctggcctacagctcgccggatttaagccacaacggcaagctgatctacgccgccgtgacctacacgctgctgaccctgctctacaccgtggtgaatatcccctactgcgcgctgggcggcgtgatcaccgacaacccgacgcagcgcatctcgctgcagtcctggcgcttcgtgctggcgacggcggggggcatgctctccaccgtgctgatgatgccgctggtcaactttatcggcggcgaagataaagcgctcggcttccagggcggcattgcggtgctctcggtggtcgccttcctgatgctggccttctgttttttcaccaccaaagagcgtgtcgaagcgccgccgagcagtacctcgatgcgtgaagacctgcgcgatatctggcgcaacgaccagtggcgcatcgttggcgtactcaccatcctcaatatcctcgcggtctgcgttcgcggcggcgcgatgatgtactacaccacctggatcatgggctcggcggcgctgttcaccgtcttcctcaccacctactgcgtcggcaacctgattggctcggcgttggcaaagccgctgaccgactggaaatgcaaagtcagcgtcttctggtggaccaacgccctcctggcggtgctcagcgtggcgatgttcttcgtaccgatggacgccgaaatcaccatgttcgtctttatcttcatcattggcgtactgcaccagctggtgacgccaatccagtgggtgatgatgtccgacaccgtcgactacggcgaatggtgcaacggcaaacgcctgaccggcatcagcttcgccggcaccctgtttgtgcttaagttggggctggcgctgggcggcgcgctgatcggctggatgctggccggcggcggctatgacgccgccgctaaaacccagaacagcgccaccctcaccatcattatcgccttgttcaccctcgttccggcggtgtgctacctgctgagcgcggtaatcgccaaacgctactacacgctaaaaacgccgttcctgaaaaaaatgatggccgagctggccgagggcgcgcgtcgcaacgaacaagaattcacggcagccccgatcgaaaaagaatggcaaaactaagaggacgttttaatgaaaatcagtgatggaaactggctcattcaaccagggctcaacctgatccaacccgtacaggtttacgaggtggagcagcaggggaatgaaatggtggtctatgccgcgccgcgcgatgtccgcgaacgcgcctggcaactggatacgccattgttcaccctgcgctttttctcgcctcaggaagggataatcggcgtgcgcatggagcacttccagggcgcgctggataacggcccgcactatccgctgaacgtgcagaaagacgtccatgtcgaaatagaaaatacggccgagttcgccgagctgaaaagcggcagcctcagcgtgcgggtgactaaaggtgaattctgggcgctggattttctgcgcgacggcgtgcgtatcaccggtagccaactgaaaaacaacggctacgtgcaggatagtaagacccagcgcaactacatgtttgagcgcctcgacctcggcgtcggcgaaaccgtctacggcctcggcgagcgctttaccgcgctggtgcgcaacggccagacggtagaaacctggaacgaagacggcggcaccagcactgagcaatcctacaaaaacattccgttctacctgaccaaccgcggctacggcgtgctggtgaatcacccgcagcgcgtctccttcgaggtgggctcggagaaagtctctaaagtccagttcggcgttgaaggcgaatatctcgagtacttcgtgatcgacggcccgacgccgaaagcggtgcttaaccgctatacgcagttcaccggccgcccggcgctgccgccggcatggtcgttcggtctgtggctgacgacctcgttcactaccaactatgacgaagcgacggtaaatagctttatcgacggcatggccgagcgccatctgccgctgcacgtcttccacttcgactgcttctggatgaaggccttccagtggtgcgattttgaatgggatccgctaactttcccggacccggaagggatgatcaagcgcctgaaggcgaaagggctgaaggtctgcgtgtggatcaacccgtacatcggccagcgctcgccggtgttcaaggagctgaaagagaagggctatctgcttaagcgcccggacggttcgctgtggcagtgggataagtggcagccggggctggcgatttatgacttcaccaacccggaagcctgccagtggtacgccgacaagttaaaaggtctggtagcgatgggggtcgattgcttcaagaccgacttcggcgagcgtatcccgaccgacgtgcagtggtttgacggttccgatccgcagaaaatgcacaaccactacgcattcatctataacgagctggtgtggaaggtgctgaaagagaccgtcggcgagcaggaggcggtgctgttcgcccgttccgcctcggtgggggcgcagcagttcccggtgcactggggtggcgactgctatgccaattacgaatcgatggcggaaagcctgcgcggcgggctgtcgatcggcatgtccggcttcggtttctggagtcacgatatcggcggtttcgaaaacacagcgccggcccatgtttataagcgctggtgcgcctttggcctgctctccagccacagccgcctgcacggcagcaaatcctatcgtgtgccgtgggcctacgacgaagagtcctgtgacgtggtgcgccacttcacgcagctgaaatgccgcatgatgccgtatctctatcgccaggcggcgctggccaacgagttcggtactccgatgttgcgtgccatgatgctcgagttcccggacgatccggcctgcgactatctcgaccgtcagtatatgctcggcgattcggtcctggtggcgccggtgttctctgaagcgggcgaggtgcagttttatctgccggaagggcgctggacgcacctgtggcataacgatgaattgccgggtagccgctggcataagcagcgtcacgatgcactgagcctgccggtctacgtacgtgacaacaccctgctggcgctgggcaacaacgaccagaaacccgattatgcctggcatgaaggcaccgccttccagctgttccagcttggcgatggcaatgaaacggtctgtcaggttccggcggccgatggttccttgattttcaccctgaaggcgaagcgccagggcaacaccatcaccgtgagcggcgaaggcgaagcccgcggctggacgctgtgtctgcgcaatatcccgcagatagcgggcgtggagggtgggactcaggcgggcagcgaactgggtgtggtagtgagcgcccagggcaatgcgctgacgattacgctgtaaataacaactcccgcagcatatcgcgggagttattctttctgcgaatttgagatcgttatcacgtatattaatgactgaaatgtgacctgacgtataaatatcggtcctttctctgtcttgtcttatttctgtccggatatccggacacgatttagtattgttgtttactccccgcctccctatatttatcctcaatgattttcatagagatcgcgtcgtatagcgatatcttattggcattaatctgctatgcaataagggtaaataatgcaaatggttacctcgcgacagaacagattattaaaatttctcttgcctaaacgagaatacgttacgttattaaaaatggctgaatacttgaatgtttcagaaaaaacagttcagcgtgacctacgttttcttgaacaatggctctctgactggaaaatcagtattgataaacgtgccggcgcgggcgtcatgctattggctgataacgtcgccgatctgttgcaattagaccagttactcagtagcgaaagcgatgatacagatgccatgatgaataattcccggcgtgtgaaaattgcttctcagttattaagtgaaacgccgcgcgaaacatcgatcagtaaattgtctgaacgttattttattagcagcacctcaattgtgaatgatttaaaagtgatcgaatcatggattaggccactaggtctgatgctcattcgtagccagagcggcactcatattgaggggagtgaatcacatgttcgccaggctatggccttattaattaatggtgttattaaccataatgaaccaggaaatattattcactcccgtctggatagcggtagctataaagccctggtgcattatttcggtgaagaagatgtcatctttgtgcagtcgcttctccaggatatggaacgaaaattaagttggtcactgggcgagccgtattacgtcaatatttttacccatatcctgattatgatgtatcgcatcacccgcggcaatgcattaccgcgccgggaacagggacatccgttatttgatgagtccatctttcgtatcgcgcagaatatgctgcaaaaaattgaggcccgcattgcccaccctttaccagaggacgaaagctggtttatttatcaatacattatttcgtccggcatgctggtggaagagcgtgatgatgtcagcatgctgcgcaatatacgctccagcgatgaggcccggcaaatcacctcccggctgatcgccctgttttcctcggtggttgatatcgatctgacgcatgacaccgcgttatatgaagggttgctcattcatatcaagccgctgctcaaccggctgaattatcgtatctatatccgtaatccgctgctggaagatatcaagggcgaattaacagaggtgtggccattaactctgcgggtggtgaatcaggtatttgccgcctggggcgagaacgcggtttcggaagatgaagtgggttatttaaccgtgcatttccaggccgcgatggagaggcaggtggccagaaagcgggtactgctggtgtgttcgaccgggattggtacctcgcatctgttgaaaagccgggtcctcagggcctttcctgactggaccatcgtcggcgtactgcctgcgggtagtctacatacgctacagcgacaggatgatattgaattggtcatttcaaccattcatctgccggagattgcgttaccggtagtctatgtcacggctttttttaacgatgccgatattaagcgggtaacagaaaaagttatcaccgagaaattacaccatgctgcaacgtcaactgccagcaatgaaattttatatccatgaggtaaataatatggacatcagccggattttaaatactaagcgtgtattgctggatatgaaggccacgactaaagcggaagttattgaagaattaaccgacctgctgcagaaagatggggccataagctgtcgcgaaacgtttattcaggacgtttggcagcgtgagtcggaaggttcgaccggatttgaaaaccacatcgctattcctcatggaaaatcatccgcggtgctgaatactacgctcgccattggccgtactcgtcaggatattgcctgggaaacgctcgatggaagccaggttcgttgcattattttatttgccgtccgtctggaagatcaaaataccacccatatccgcttactctcccaggtcgctggagcgttggccgatgatgacattattgcgcaattgctcgaagaaaccagtccgcagaagattattgatctctttagtcaatatgctgaatcggatgtttactaacaataactagtggagtctgagatgaatattgtctgtgttgccgcctgtacggcgggtattgctcatacttatatcgcacgtgagaagttaatgaaaggcgcgaaagcgctgggccacaatgtcaaagttgaaactcagggaacaataggtactgagaatgaactgacaaccgaagatatcgctgccgccgatgtcgttattcttgccgttgatgtgaaaattaaaggcgaagagcgttttaaaaacaaacgaattgtccgcgtgaaaacggaggtcgttattaagtcaccgattcagtttatcgaaaaggtcgagaaatccttagctaatgcctgatccttattctggagggatctaccatgagtgagaataaaccacctgtctcgcaggaaattaaaaagcatttgttaacgggtatttcatggatgataccgctgattgttgccgccgggatctgcattgccctcggtcaggttctgggcggtaccaatgtcgccgagaaagtcggcaccattccatggatgttgaatcaaatcggcggctgggggatggggctcatcgtcccgctcatctgtgcggcgattgcctattctattgccgacagacctggttttgcccctggactgattgttgggtttgtctgcgggcaaatccacaccggtttcatcggcggaatgctgggcggtttcctggtgggctatacggtgctgctgttaaagcattacgtgcggttgccaaaatcgatgcaagggctgatgcccattatggtgctgccggtattaagcaccattatcagcggtctgttgatgatgaccctgataggcaagccgattgcctggctgcaggaggccttgattcatctgttggagtcgatgcagggcggttcacgattcctgttgggggccattcttggcgcgatggccacctttgattttggcgggccggtgaataaaaccatgtcgttattcgccgatggcttgctggtgagcggggtctatgggccggaggcggtcaagtttgtcggctccatgatcccaccgttcggtattacgttgtccttcctgctgacccgccataaatatacccgtgccgaaagtgaagcgttaaaggccgccttcccgatgggtatttgcatgatcaccgaaggggtgatccctatcgcggcccgcgatctgctgcgggtggtgggatcctgcgtcgtggcttcagcggtggcaggcggcttgattatgacctggggtgtggaaagcccggtgccacatggcggtatgtttgtggtgccgctattcacccatccactgctgttttgtctggcgctggcgattgggacggttatctgcggcgtgatgttgtcgctatggaaaaaaccggtcacggagcgtgatgaagagtttgatgaactgagcgaccaaaaagtcgccgatgatgaaatcacctttacccttgagtaaacggaggccctatgtttgccgatatgaagcagatggttgagaaagcctggcgtgaacagtatgccctgctggcgattaactgtatgaatctggagagcgcccgcgccgcggtacgcgtggcggaaaaataccgcgcgcctattattctcaatctctatcagggccatctggcgcattttccgccagcgacagcgatggcggtggccaggacccttgccgaagaggccagcgttcccgtgaccttgagtctcgatcatgggaaagaaccggtgaagatccgccaggcttttcgcgctggattcagcgggttgatgattgatgcttctgcatttccacttgcggaaaatatccgccagacccgagaggtcaccactctggctgccagcatcgggctgtgtgttgaaggggaattggggcatctggctgatgctccgcgctatgactctgcgacgaacgccgacctgatgacgcaacctgaggacgtcgccccgtttatcgagcaaaccggtatcgacttactggcggtctccgtcggcacggcccacggcatgtatgcgcctggggtcacgcccgcgctggactttgaccgtctggcgcaggtgcagcgagcctcttcggtgcccctggccctgcacggcggcagcggcacgccatttgatcagcttgcctgctgcccggcatttggcgtggcgaagattaatgtcggcgcggcggtgtttgaggcaggtaaagccgcactactccataccctttgccatgacagctctattgaactggccgatgccatggcggtgatggaacacgccagcgctgaagctatcgtcccttacttacaagcatccggcgcgataaaccgcgcctgattcacttatcagtcacgccctttatgccagcgcatattcgccctggcagggcgaactacaccctgaaactggagaagaccatgttagtttccatgcaagaaatacttaaaccgactcgtgaacacggctttgccatcggtgcatttaacgttgcggacagctgctttattcgcgccgtcgtggaagaggcggaagcgacaaatactcccgccatcatttcaattcaccccagcgagcacgactttgtcggcgattccttttttagctacgtgcgggatatcacccagcgtagccgggtgccgtttacattacatctcgatcatggcgcctcggtggagcatgtgctgcgtgcgatccagtgcggttttacctcggtgatgatcgatgggtcgctgctgccctatgaagaaaacgtcgctctaacgcgggaagtggtcaggctggcgcatgcggttggcgtctctgtcgaaggtgaactggggaccatcggccagacgggaacgtcggtagagggcggagtgtcgaaagtgacttataccgacccggcgcaggcgcaggattttgtcactcgtaccggcgtcgataccctggcggtggcgattggtaccgcgcacggcatctatccaaaagggatgcaacctgaactgcagatgcacatcctgcgcgatattgccggacgagtgtcgatcccgctggtactgcacggcggctccgccaatccggatgcggaaattgccgagtctgtcacgctcggagtcgggaaaatcaatatctccagcgatatgaaacacgcttacttcctgaaagtacgtgaaattttgagtaaagagagctggtgggatccgaatgtgatttatccggaaccgattaatgccgcacgtgaagttattcgccacaaaatgaagttgtttggttccaccggcaaagcaagcttgtattgacccagtcggaaggcgggtacgcccgccttccaatcggcaggaggcaaagatgaattacctcggactggatgtcggtgggacgaaaatcgccgccgtcgtgatggatgagcagggacgggagcggggtcgttaccgctgcgcaacacggaaagaaaaccgtcgggcatttatgtcgtgcatcgtggatttcgttgccgatattcgcgcgcggacgggaacgccgatggctattggcatcgcgttgccgggtagcgtttcgccacagcattgcgtcattcgtaacgccaacattcaggtgattaacggctatcgtttacaggatgcgcttgaacaggcgctcggtcagccggtggtgttagccaacgatggcaattgtttcgccttatcagaagcatgcgatggcgccggagaagggttttcatcggttttcggcatgacgttagggaccggctgcggaggtggtattgccctggagcggcagcctttcgtcggcgcctcaggtattgccgcagagtgcgggcatatcgccttgcccggctattctcctgaggaggatgggccgccgacacgttgttattgcggcagatttaactgtgtggagtcttttatttccgcaacggggctacgtgaacgctatcgactgctcagcggagagtgtgtgtcgagcgagcagattctcgcccgcgcgcaggcgggagaatccgccgcttgccatcaggtccaccgctttcgtcaacagctggcgcggacgctggcgactattgtcaatatcatcgaccccggcgtgattgtgttgggcggcggtttatccaacgcgccgcagctggtagcggatttaccatcggcggtcgcaccgctcgtcttcaccgaccatttttctacccctatcatttctgcgcggcatggcgacagtagcggtatgcgcggcgccgcctggcttgccgtgcgaagcggagttaaaccatgaaacgttcccagattaactatgcgatagataaagcgctggcgatggccgaaacttttcgtatcagcctgccggaatttgcccactttacggcgtcaagctggccacaaaaacggcatgaaggttggcatgaagtccaggatctacagcttggatgggatgtgacggatttcgccagcggttgctttcgcgaaacgggccttacgctgttgacgttacgcaacggttctttatccgacccgcgttataccaaaccctacgcggaaaaaatgttgcagattcagcaagatcagcaaaccccctggcatttccattaccacaaaatggaggacatcattaaccgcggcggcggcgacctctgcatgcaactggcctgggcgacacaggacgaacagttagaccaacagcgccatgttagcgtgatgatcgatggctgccagcgtacgctgaaacccgctgagacgctggtgctgcatccggggcagagcgtctgtctaccggtggggctctatcatcgcttctgggccgaaaaagggatagtgatgggttgggaaatttcaatggttaatgacgaccatacggataatcgttttctcgaggcgggcgggcgctttccctccattgaggaagatgaacctgcaagatggctgctgtgcagtgaataccggcagtgacgttgagagccatcccacagaccgatttgctctccggtggtagcgtaatctgccgctgagaggagcccgtaatggacttagaaaatatctttcgtgacgtgaagttgagtaaaaccgaaatgaccgtgctgcgttttattcaaaatgacccgcagctatgtatccgcgaagggatccgcaccgtcgcggagcgctgctacagtaatccttcttcgctggtgcggctggcgaagaagcttaagttcagcggctggctggagctggtctatttcatcaagttcaatatcaccatgccaaagctcgatgtcaccaacgatatcgattatatgagcattcagccggcagaagcgctgacgccgctgctggcaggccttgagcagcagcgtattttgatccacggcagcggtttttcgcagctaatcgcccagtatatttataataagtttctcgttaccggcgtgaacgccagcctggcattgtggcccgattacgaaatccttgagcaaaaaaacgctgcccgctttgattctatctggatcatctctaaatccggacgcagcagttcggcgttaaattgggttaaggcgctggaaggcaaggagataaacctggtttgctttaccggcgattatcaaagcccgctggcgcaggccgcgaatacggcgtttattattcatgacccgcagaagttcgacgatgatatttactggagcaacccgttttttggctactgcatattgggctttgagcggttgttaaaaatgtggtttaccagcgtacgtagcaataggtagccccgctaagcgtagcgccgccgggcaatatccgcggataaggagccgcttttgcgccgggtggcggcttcgccttacccggcctacagtccgtgcgacctgcctttaatgtcttcaccacgctggctgaaactgccagtgctggtggcctcaaaatcgctgagacgttcccggaaggccggggcagcccgcatggatgcgggctgagggccgtgatttgcaaggacgctgcctcggcccgacccgaagcctgccgggataaggcgaggggaccgcgtagcggcgattttggcggccagagcccgggagtacagagggcggcggcgactggccgccctttgtgcgttccctgcgccacggaaaacatattgcagaaaaattaaccgggagcgcaatatcctctggagcgaaacgagataaacgcttttctcaagctaaaaggttgcaaaccgataacagtatctactcaatcgagcgggggcgactcgttaccgccacccggcgaactgttcatcgtcgagataggcctcaaccagcttcttcgccagcgaatatgaaccgaccagcggatgagccatcaacgcctgcatcgccagcaatttgtcctgctgcagaattgccgccaccgccaatcgttcatactccttcacgctggcaatcatatttttctgcgccgtcggcacgttaaccggcgtcaccggcttaagaccctctttgctcagatcgcagctgatttcaatcacatcgtcggggcgtaaaaaatcgagcgtgccgttattttgtagcgacaccacgatgcgtttggtggtggtgctgttgaccgcctccagaatatccagcgccaccccggcgtagccgccggtatctggctcttcgataaactgccgcagcgttaacggctcgcgggtatggaatttttcctgctgcgactcgttttgcatatagctgttttcgcggcgtaggtagtgcttcatccagatggtaaaggccgcctgcggatccgctttaacatccacgccgctgagctcctgacgcatatcgtggttgatacgggcaatctgctcgccgcgggtctccggcgcctgttgaatcgcccgtagcgccacttcgcgatagtagtagtaatagagatattcgttaagcaactggttatcgcacagtttgaccagctccggcgagaagtactgcatcgccgttttgcggtacaaatccgggttggcgaccagctgcgcggtaacctcttccccgcgcacggtgaagtgcgtaaaccaggaaaaatggtttaaaccgtagcattccacgctcaggtcgtgcgggtcgcagccgaggatctccggcagctcgcggatgagttccgacggcgcatcgcaaatcccgtatacccggcgtttgaaaccggatttgataatcgcctcggtgaccagcccggacggattggtaaagttaaacaggatcgcgtctttgtcggcatgttcttcgatcagccgacagtagcgcaggatcgccgggatcgagcgcattgccatggcaaaaccgcccgcgccggtggtctcctgacccagcgtgttatgctccagcgcgattcgctcgtcgcggatgcggctctcatcgccgccaacgcgcagcgtggtaatcacgtaatgggtaccctgcagcgcggcaaccggatcgctggtggtcgtaaaatgaatatccgggcgaatggtattaaatacatagcgggcgatttcaccaaatagcgataaattctccgctgagctatcctgaaataccacttccgttaaaccaatgcggtgcgcgttataagccagcgactttgccagaaatgcagagcgcacgccgcccccgcctaatacggttaatttcatacatcactcccaattaattttctgctagccagctatcaacccgggaacggacttgcccgactttgacgccataaataacctgaacttcattacgattgcgtactacgccatttgcgccagtactttttaatatttcatcatcaactaatgccatattatggacaaccacccgcaggcgcgtgaaacagttatcaacggagataatattggctttaccgcctaagccattaataatttcatccgtcatcgactgcgggccgctgacttttttacggtagtccgccttactgtatagcttgacgttatcgtcatcctcgcggcccggcgttttcagatttaacttcacgaccagcgtgcggaatatcgcgtaataaacgataaattggccaataccgatcagcacgtaccccggccagcgggttaacgacaccggcagcggcaggttgtagatcagaaattcaatcaggccggaggcgccccacggccgcacggtgaagatatcgcaaattgcctgcgaagcggcggttaacgtcgcatggatcacccacagcagcggcgagacaaataagaatgtgaattcaatgggttcggtgatgccggtcagcatcgaggtgataatcgccggcagcagaatcgcctttgccatcgctttcttctccggcttcgcggtgtgataaaacgccagcgatgcgcccgccaggccaaagatggtggtcatcccctgttgcgagaaacgtaatgcatcgttcatcaccggtgtcagatcgggatggcgcatataggcgaggaaaatcgcctgggtgccggagacgacctggccatcgacatttagcgtgccgccgatttgcgtgagctggaaaggcgaccacacgaaatggtgcaagccggtgggaataaggaatttttcaaagaagccgtagacaaacactcccgcaacgccggcattcttcataaacccggtcagggcgctaatgccgtgggtcataaaaggccaaatccaggtaaaagcaatggcatagcagataatgactggcgtcatggcgaccagcgtcagcttcgccccgccgtacatcgatagcgcgccgggcagctcaatattggagactttattatgtacccaggcaatggtgcagccaagaatgattccgaggaatactcccatatcgacgaccacaaagcctaatagctgcgtttgcccggtaccgtaatattcgccgttaattttttccgccaccgcatgagtatgttccagccatgaatggttggcgccgagaaacatgataaaacacatcaccgagacaagtgcgacctctgtttttttatcttttgccagaccgtaacttattcccacgcaaaacaataatccgaggttaccgaataatggccagaaggtatcgccaagcagttgccctaattgatgaaggaaactggtttcagcaataagagtcgggttagttaagacggaactgagagccagaattaatccaatgaccggcaagaacaatactgcgccgatcatggccctggagaatttttgcatattctccagaatacgttgacgtattacagacatggttgttccttttatttttgtaggtacaggggatcattattcttatcaacttccagtattttggttatagcaattctgatatttgaaaggaacctgttgcgggaaataggcacagatagccgctaattgcatacaggtttcagggagggggattagccctcttccgccgggaagagggcaagaggaaaatggctacggcgttacgggaaccgacgcggcaggcgcgttgctaacctcgccgttgcgcatcacctgcgccgcctgctgcttgtccatattggtggcgctgagctggccgttgacgctcggtttcagcggcgcattggcctgcacgctaccgttcgcggttagctggaagttgccgtcgccgctaatcggcagcgcaggccagccccaggcctgcagaatattcagcggcacgccgcggccgttcaagctcagattgacctggcgttgcggcaattgtgacaccgcggcggtcgcctgcagaatgccgcgctcggtaaaagcgctcagctcgctgatgttgaccgtagaagcgttcgcgttcagcttcagcgacggacggcgcacgtcgatgcggttgaaggtcgcggcggcggcattgagggtggcgctgccattccacacgccccactgaccatctttcaccagctgtaattcgccgccgtaaccgtccagcgcggtgatctgccacgggaaggctgggtcgatatcgataatcagatttcggctggcgctgaatttcttcagcgtcaggctttgcagccagcccggcatcggctccatccacagctgtttccagttggacggtagcgtatattccagcccggcgaaggcggcatcgtcgagcaccagcgcattaccggcgcgcagccagttgccagaggtacgcaccatgccgccctcccagcgggagctgaactggcgtagcgcaatgccctgcggcgagaattcggcattaacgatgggatcgaggaaattcagcgaaccgtagataaactcgctggcgttcatcgatagcgtcccgtcgtcgctttgccagccgttatggctcaaggtcagattgcgcaagttgaggtcgaggtcggtcaccgcccagcctggcccctgcaaacgagcatcggttacatccagccggccaatctgcagcgacggcaccgaggtgagcggcgcaaggaactcattcagcggtttggcgctctgcagacgaatttcattcaggcgcaggttatcaaccagccagctaccgtcggcgcggcgtttggcgttaccggtcagcgtgccgcgcgcgatatcggcgccaagggtgttcagggtcacctcgccgttatccattgccccctggatcaggacgttgctggcttcgatgccgttaatattcatcgagcccgcgctcatctgaatttgcgcttttctgcccagcacgtcgcccgcttccggctgccacggcatcacgccaccggtcacccgctgcgcgctcaggttccactcgctgtccgggctgttaaaagccatatcgcgtagctgcaggcggtcggcggcaaacggcatcgaggcggaagccggagaaagattcagcgtgccgtcgctgaggacgatttcatcagcgtgcagcgggtcgctgaactggcgggtgctaaaaccgatatccaccgttctggcaaccagcgtcggcggcttgccgtcgcggccaaaggtgacattttgcaactgcagatgtagtggggaagagaagtcatgcgccatcttatcgaaggcgattttccagccggtgctttcgcttaaccaactgctcgcctggcgcgccccccagcgggtttgcagcgcaaagtaagcggcgacgataacgaccagcagggcgatcagcagccagagaaccagctttccaagaaatttcatgatcttccatcctgataagtacacatcaccgtgttatgcacgatttatgcgcaatcctcaaggcgggaatagtgaaatgagatgaagtgaggtgaagagatgttacagccgccgcgctccctggtcgccgtggcgataccggggagcgcaacttcaatgcgttagttcttctcaggcgggaagattaaattcagaacaatcgccgtgataccgccagcggcaataccggaagagagcaggtttttcagccagtccggtgcgaactgcaggattagcggctgctgcgatacgccgagacccaccgccagagagagggcgataatcaggatagcgcggcgattcagcggctcgcgggagacgatgcgcacgccggatgcggcaatggtaccgaacatcaccagcgtcgcgccgccaagtaccggttcaggaatatgctgcacaaagccgcttaccgccgggaacaggccgagcacaatcagcatcagcgccaccacaaagcccacatagcggctggcgacgccggtcagttggatcacgccgttgttctggccgaagcaggagttcgggaaggtattgaaaacggcggaaacaaatgagttcaggccgttcgccagtacgccgcctttcaggcgtttcatatacagcgggccggagaccggttgttcagaaacgtcggaggtggcggtgatatcgccaatcgtttccagcgaggtgatcataaagaccagcatcagcggcagcagcaggctccagtcgatgcccaggccgtaatagagcggcgtagggatagtgatcaggctgctgttggtaggcgcggtgttagccggcagcatatcgaggaaccacgccgccagataaccggcagccatcgcgatcaccagcgaggcgatgcgcaggtacgggttgcgctggcggttgaggataataatcagcgccagcacgatgcccgccagcagcaggtttttcggcgcgccgaaggtgtggtcggccatcgccgcatagccgccgccgatagaagtcaggccaacctgaatcagcgacaggccgataatcatcaccaccacgccggagaccagcggcgtaataatgcggcgcgccagatgcagaacccgcgagaggaccatttcggtgcagctcgccagcatcagggtgccgaacagcgcggccatcatcgtcggcacgtcggcgccgccggttttcagcgcggtgccgcccataatcaacggggcgacgaagttgaagctggtgccctggatggagagcaggccggagccaactggtccccaggctttaatctggataatggatgccacgccggaggcgaacagcgacatgctgatgatgtgttgcgtatcttcggccgggaggccgagcgcctgacagataagcagcgccggggtgatgaccgcgacaaacatcgccagcaggtgctggaatgcggcaaacagcgtttgcggaagcggcggacggtcttcgaggcgatagattaattcgctggctggtttatgcgcaaccggttgcgcattttctgactctgcggtcgtaacggacatcacaaacaatcccaaggtggcaaagcgggaattttatcggactgtagaccaaaagcaaacgtttgctacgatttggcgcaaaaaatatcctcactgaatagatgtaacaaattaattaacattttgtatgcttgatcgcatcaacgctaatacaaaatatctttttctgtcattttttgcgcacttctgcttaaaatcgctctccgactcctcaagatgagaagtaatcgacaccgggaataccgtcgcgtgtgaatgaatcatgcgcccataaggagctcttttttatgttgcatctcgataccttatcgacgcttgttgccgcaaccatggtgttgcttttagggcgaaagctcgttcagaacgtcccattcctcaaaaaatataccattcctgaacccgtcgccggcggcctgctggtggcgctggcgctgctggttttgaaaaaaagcatggatatcgaaatcgatttcgatatgagcctgaaggacccgctgatgctggcgttcttcgccactatcggccttaacgctaaccttgccagtctgcgggcgggcggcaaagtgcttggcactttcctgattgtggtggtgggcctgctgctgctgcagaacgctctcggtatcggcatggcgaagctgctggggctggatccgctgatgggtctgctggccggttctatcacgctttccggcggtcacggcaccggggcggcgtggagtaaattattcgttgagcgttacggttttgccaacgctaccgaggtcgccatggcttgcgcaaccttcggcctggtgctcggcggcctgatcggcgggccggtggcgcgttatctggtgaagcactcttcctcgccggacggtacaccggacgaccagctggcgccgacggcgtttgagaagccggatatgggccgcatgatcacctcgctggtgctgattgaaagtattgcgttaatcgctatctgcctgaccgtagggaaggtggttgcgcaactgctggcgggtaccgtgtttgaattaccgaccttcgtctgcgtgctgtttatcggcgtgatcctcagtaatggcctggcgctggcagggctgtatcgcgtgtttgaccgcgcggtatcggtactgggcaacgtcagcctgtcgctgttcctcgcgatggcgctgatgagcctcaagctgtgggaactggcgtcgctggcgctgccgatgattattattctggcggtgcaggcggtggcgatggcgctgtatgcggtgtttgtgacttaccgaatgatgggtaagaactatgatgccgccgtgctggcagccggtcattgcgggttcgggcttggcgcgacgccgacggcgattgccaatatgcaggcgattaccgaccgttttggcccgtcgcatatggctttcctggtggtgccgatggtgggggcgttctttatcgacatcgtcaacgcgctggtgattaagctgtacctgttgttgccgatatttagctgataaaaaacccggaggcggtgctgcgcacctgtccgggctacaagatcgtgctgtttggggttttgtagcccggctaaggcgtttacgccgcaagccgggaatacctccacaatcttacgcttcgtcgtgctcttcccacgctaacgcgcgtttcaccgctttcttccagccgctgtagcggaaattacgctcggtggtttcaatacccgggcggaactcacgttcaatcaccgctttctcctgcagctcgtcgagattttgccagaagccgaccgccagacctgccagataggcggcgcccagcgccgtgacttcacgcacttccgggcgttccacgcgggtgccgagaatatcggactggaactgcatcaggaagttgttggcgaccgcgccgccgtccacgcgcagggcgtgcagacgaataccggagtcggcctgcatcgcttccagaacgtcacgcgtctgataggcgatagattccagcgtggcgcggataatatggttggcgttcaccccgcgggtcaggccgaaaatcgcgccgcgcgcatacggatcccagtacggcgcgccaagaccggtaaaggccggcaccacatacacgccgttggtgtctttcaccttagtggcgaagtattcagaatcgaaagcatcgttgatgagtttcatttcatcgcgcagccactgaatcgacgccccggccataaacaccgcgccttccagcgcgtagttcacttcgccggtcgggccgcaggcgatggtggtcagcaggccgtgggttgaggtcaccgccttttcaccggtgttcattaacatgaagcagccggtaccgtaggtgtttttcgccatcccttctttcacacacagctggccaaacagcgccgcctgctggtcgccggcgatgccggagataggaatacgggtgccgcctttaccgccgatgttggtctggccgtacacttcagaagacttacgtacttccggtagcatggcgcgcgggatatccagcgcgtcgagcattttgtcgtcccagtccagttcatggatgttgaacaacatggtacgcgaggcgttagtgtagtcggtgacgtgcacgcgcccctgggtcattttccagataagccaggtatcaacggtaccgaacagcagttcgccgcgcttcgcgcgctcgcgggcgccttcgacatggtcaaggatccacttcactttggtgccggagaagtacgggtccaccaccaggccggtggctttacggatgtactcttccatgccgtcgcgcttgagctgctcgcagatatccgcggtgcggcggcactgccagacgatagcgttgtaaataggcttaccggtctcacgctcccaaacgatggcggtttcacgctggttggtgatgccgatggcggcaatttcgtcggagttgatatcggctttcgccaacacttcgaccagcgtagagctctgcgaggcccaaatctccatcgggtcgtgctcaacccagcctggcttcggataaatttgttcgaattcacgctgtgacacgctgacgatattggcgtcgtgatccatcacgacggcgcgggagctggtagtgccctggtcgagcgcaacgatatattttttctcggtcataattggtgtcccgtagtcagattacagcgaagctttttgttgcgacgcggaagaagcggattctttttcttcctcgacgcaggtgtcgcaaggcagatggcggccaatgaatttgcggtagctgaatgcgcccagcgccgcgccgaccaccggtgcgcacagcggcaccaggaaataaggaatatctttgccgccggtgaaggcgacgttaccccagcctgccagccaggcgaaggctttcggtccgatatcacgcgccgggttcatcgcgaagccggtcagcggacccatagaagcaccgataacggcaatcagcagaccaatcagcagcggcgccagcgggccgcgcggcacgccgttgccgtcgtcggtcagcgctaaaatcacgcccatcaggatagcggtaatcaccatttctaccgcgaaggcctgcacaaaattgatatgcgggttagggtaggtcgagaagataccggcgagctcaaggctttccacgctgccgcgtaccatattgtgggtgtgttcgaaatcgaagaaaagattgtaataaagcccgtaaactaatgccgcagcgcaaaaggcgccagcgaattgcgaaataataaaaggaacaactttgcgcccatcaaagcaggcgaataaccataaggcgatggtgactgccggattaaggtgcgcgccggatacgcccgcggtcaggtagatagccatagccacccccagaccccagatgatgctgatttcccactgaccgaagctggctcctgcgactttgagcgcagctacgcacccaacgccgaaaaagatcaacaacccggtaccgagaaactctgcgatgcactggccttttaatgttgatgtctggctcataatcggatcctgaagcgaagtgattattgtaagtatgttggtcgcggacgaccacggtgccttgtaggcatagtgttaatttatcgttaacgagcataaacgagaaatatcgaaatttaaatttgtgtccctcgtcaagaaaatgagcgttttcgcgccataaacgcgtgttgcggcacatttacccacctttttctgcgtattttgttatctcattgattaacaatcgccagagaagttcggggcaattgccgcgaacgcaccaggtaaagactgaaaagtgttgcaaaccgcaatctgcgcgggttgtcgctggacaggtgaggcggggattcatacaatcgacgacaacaccgctattgtgcgctaattcgttaaggcgggaccgcgtatacgaaacacgagtttctatcaacgccttgcaagatcaggagaggtatgacgatgtcattagaagtgtttgagaaattagaatctaaagttcagcaggcgattgataccatcactctgttgcagatggaaatcgaagagctgaaagaaaagaacaccacgctggcgcaggaagtgcagagcgcgcagcacggccgtgaagagctggagcgtgaaaatagccagctgagagaacaacagcaaggctggcaggatcgtctgcaggcgctgctgggccgcatggaagaagtctaatcgcttcccgccccttcccgcccgggaaggggttttctctatcccccgctttatatctccaggttatagccaatctttttttattctttaatcattgattcgctttctggcacgcttagttcatcacaacacgacataaagagagcggtgcgatgaataagtggggcgtagggttaactctgttgctggcatccgccagcgtgctggcaaaagattatcagctgttaaacgtatcgtacgatccgacgcgcgagctgtacgaacagtacaataaagcgtttagcgcgcactggaagcaggaaaccggtgataacgtggtgattcgtcagtcgcacggcggctccggcaaacaggcgacgtcggttatcaacgggattgaagcggatgtcgtcaccctggcgctggcctacgacgtagacgccattgctgaacgcggtcgtatcgataaaaactggctgaagcgcctgccggataactccgcgccgtatacctcaaccatcgtgttcctcgtccgtaagggcaacccaaaacagatccatgactggaacgacctgattaaacccggcgtatcggtcatcaccccgaacccgaaaagctccggcggcgcccgctggaactatctggcggcatggggctatgccctgcatcagaatcacggcgatcaggcgaaagcgcaggagttcgtgaaagcgctgtataaaaacgttgaagtgctggattccggcgcgcgcggttccaccaacaccttcgtagaacgcgggatcggcgacgtgctgattgcctgggagaacgaagcgctgctggcgacgaaagagctgggcaaggacaagtttgaaatcgtgacgccgagcgagtccattctggccgagccgacggtttccgtcgtcgataaagtggtggataagaaaggcactcgccaggtggctgaagcgtacctgaagtatctctactcgccggaaggccaggagattgcggcgaagaacttctatcgtccgcgcgatcctgatgtggcgaagaaatatgccaacgagttcccgaaactgaagctgtttaccattgatcaggagttcggcggctggacgaaagcgcagaaggagcacttctccaacggcggtaccttcgaccagattagccagcgttaatcctcttgtccctgctggcgctacgcttagcagggctacagttctgcgccgtccggtagcccgggtaaggcgacagccgctacccgggagtccctgcttgcgctacgcttagcagggctacagttctgcgccgtccggtagcccgggtaaggcgtcagccgccacccgggagtccctgcttgcgctacgcttagcagggctacagttctgcgccgtccggtagcccgggtaaggcgttagccgctacccgggataactccccgcccgccatctgtttttatttagtcatcaaattacgttactcttccggttcaggcttaacagggaacaataatgagaagagtaagataccttttatgggcgctgctggtggttattctggcggcgctggctggcggctactattggctgcattccggtaacccgaacgcgttacgtcatattgtcctgcagcagtgcgtacccaatcagcagcaacatcaaaacccgtcgccgtgcgcggaagtgaacctgaaaggcggctacgtgttgtttaaagatcgcaacggcccgctgcaatatctgctgatgccgacctaccgtattaacggtaccgaaagtccgctgctgttggatccgctaacgccaaatttcttctggcaggcctggcaggggcgcgaaattatgagccagcgccgcggcgcgccgattgatgataacgcggtatcgctggcgattaactcgcgcagcgggcgcacgcaaaaccatttccatattcatatctcctgcctgcgtcccgatgtccgcgcgcagttagataatgatgcggcgacaattagcagccgctggctccctttgccgggcggtctgcagggccatgaatatctggcgcgtcgggtaacggaagccgagctggctcagcgcagcccgttcctgatgctggcggaagaggtaccggaagcgcgcgaacatatggggcgttatgcgttagcgatggcgcggcaaagcgacggctcgctggtgctgttggcgacagagcgtaacctgctgactctcaaccgtgcttcggcggaagaaattcaggatcatagctgcgcaattcttaacgcaaaccactagttctggcgtttacctgtctttcctgtcgtcgtattcttgctgaaaaaaacgacaggagacaggcatgtcgctctggctaacccacccgctgttcctcccttcgctgatcgtcggcatcaccattgtgctctgggcgacttcgctgttaccggaatttatcaccgcgctgctgttcttcgcggcggcgatgatgaccaaaatcgctccgccggaggtgatcttcggcggttttgcttcctccgcgttctggctggtgttcagcggctttgtgttggggatcgccatccgtaaaaccggactggcggatagagcggcgcaggcgctatcggcgcggctcaccgactcctggccgcggatggtcggcagcgtcgtattactgagttatgcgttggcgtttgtgatgccatcaaatatggggcgcatcgcgctgttgatgccgatcgtggcggcgatggcccggcgcgcggggatagccgacggcacgcgcggctggtacggcctggcgctggcggtgggctttggcaccttccagctatctgcgaccattttgcctgctaacgtgccaaatctggtgatgagcggggcggcggaaggctcttacgggatccatttgaattacgttccctatttactgctgcatacgccagtgcttggctggttgaaaggggcggtgctggtggcgctgatctgctggctgtttcccggcaagccgcatccgccgcgcgagctggcgccgctggcgccaatgagccgtgacgaaaagcgtctggcgtggctgctggcggtggtgttgacgttatgggtgacagagagctggcacggcgtcggcccggcgtggaccggcctggcggcagcggtggtcacgctgctgccgcgagtaggatttatcagcggtgaggagttcgccagcggggtgaatatgcgcacctgcatttatgttgccggcattttgggactggcgattaccgtgacccaaaccgggattggcggcgcggtgggtaacgcgttgctgcaggtgatgccgctggataaagataatccgttcaccagcttcctggcgctgaccggaattaccagcgcgctgaattttattatgaccgccaacggcgtcccggcgctgtatacgacttttgcgcagagctttgccgacgcgaccggctttccgttgctgagcgtgattatgattcaggtgctgggttattccacgccgctgctgccataccaggcgtcgccgattgtggtggcgatgggattaggtaaagtcccggcgagagcggggatgttgctatgtctggcgctggcggcggtgagctatttgattttgctgccgctggattatgcgtggtatcagctattagggaaattgtagcgataatataaaacccggctcgcgctgcgctaagccgggttttcatttggcgaatttgtcagcaaccccggcagcgtttcaccaccgggaaagcgaattacgcttttttcgccgcttctgcagctttaacgatcaccgcgaaagcgtctgctttcagggaagcgccgccaaccagcgcgccgtcgatgtccggctgggtgaacagctctgcggcgttgccggcgttaacggaaccgccgtactggatgatgacctgctcagcgattttagcgtcagctttagcaatgtggtcacggatgaatttgtgtaccgcctgagcctgcgctggggtagcggatttaccggtaccgatagcccatactggttcgtacgcgataaccacgccttcaaaagcggctgcgccctgagttttcagcaccgcgtcgatctgacgtgcgcacacttcttcagttttgcccgcttcgttttcagcttcggtttcaccgatgcacagaaccggcgtcagaccctgctctttcagtacagcgaatttcttcgcgatcagctcgtcggattctttgtggtaggtacggcgttcggagtggccgatgatgatgtactgcgcgccgatatctttcagcatttcggcggaggtttcaccggtgaatgcgccggacaggttcacgtcaacgttctgcgcgcccaggtggatgtggctgccttctgccgcacgcttagccaggtcgagatacatttccggcggcgcgattgccactgcacagccgcttacgccggccagttcagtacgcaggttagcaaccagttcgtttaccatgtggcggctgccgttcagtttccagttacccatcactaaaggatgtcgcattttaattctccacgctactaagcgaattaaggaatatagccgccccagagggcagcatggtctgtgaaacagtatagagactcgtcactggaaaggctttgctttttgtcatttattgttgtcttccagcgtttcagatagcgccagcttaatcggttcaatggcgaaagttagccctttttccccgtgatctgccactacatagcgcaccgcgccttcggtttcggtgtagtagcgtttgcctttgccggcggtcagcagtttttgcaacttttgctggctctgcagtggacttagcgtcggtacaaaagcgcgaagaatagcgctcatatactcctgcgctttcgctttcgccgctttttgttccggcccctgaatcggcagccaggttatctgcatcgatttaatctttagcgtgccgcgctccagcgcggtagaggcatacagattctcgttaatcttggtggcagcgcgggtcaggttagctttatcgcggctggaggcgatagaacgaaactcgttaagcggcagtttcggattatcggcattaaatttttcgcggaactcgctgatgctgacatcaaaaatcggcgcgctgggtaaaagatagggggcggtggcggcggattctgtttctgcggacaacgccatcgggccgacagataacgctgtcagcccaatcaaacttaagattgcccacttcttcatgcctgtctttcctttttttgcctgccgacgattaaaacgggaaccgtcacgcttgtcaaaaagtgacgccttcagggtaaactacgcgaatgatgatgataaggaataaaacatgaccctacagcagtggttattctcaattaaaggccgtattggccgccgggatttctggatttggatcgttatctgggtgttgaccatgagcgcgctgtttaccctcgcgggcagcaatttgctgagtttacagaccgcggcgtttattctcgtctgcctgctctggccgacggcggcggtggtggtgaagcgtctgcacgatcgcgggagatccggcctctgggcgctgctgatgattctggcgtggatgctgctggcgggcaactgggcgatgttgccgcaggtctggcagtggggcgtcgggcgctttgtaccgacgctgattatcgtcatgatgttgatcgatctgggcgcgttcgtcggcacccagggcgaaaataagtttggtaaagagacgcaggatgtccgctggaaagcggacgcctgattaccagtagtgctctgctgtcatatggcccggtcggcgacgcagatgtttggtcatctgccgggtctctttcagcaactgctgggtatcacgcaccatctgcgggttaccgcacagcatcacgtggctggtatcggcggtcatagccaggccgaccgcctcttccagcgcgccggtttcaatcagaaacggcacccggccggtcagcgaaccttccgctgtctcgcggctgaccacggtctggatacgcaatttgccggcgtagcgctgctccagctcgcgcatttgcggtaaatagctgaggtcggctgcgtagcgcgccgcatgcaccagcaccaggtttttgaagcgatccaggtctttcccttcttccagaatcgacaaataggggccgatcgccgtaccggtggcgagcatccacagcgtgtcgcagtccggcacctcttccagcacgaagaaaccggcggcttcgctaactatctgaacgtcgtccccgggtttcagcgcggccagtcgcgggctgagtttaccctccggaacggtgaccaggtagaactcaagatcgggattgctgggggcgttgacgtaggagtaggcgcgctgcacgcgctcgccgtcaacatccaggcccagtttagcaaactgccctgcggtgaacggctcaacgggcgcgtgaatggtgaggctaaacagtgcatcggtccagttttgcacttttacaactttacctgtaacccagtttgccattgcgtctctcctttcaatctcgtcagtctatcttcaccgcgacgggagaagatttccagcccgaaaaggctggaaagctcgattgatcaaatgttttacaggatgtgttgctggacgtccgggtcttttcggtcgaggtaatgaatcgactgaatacggcggatagtccgcgatttaccgcggatcagcagcgtttcagtggtcgccatattgcccttgcgggtaataccgtccagcagatcgcctttggtaatcccggtggcggagaagatgacgttatcgctgcgcgccatttcatcaagacgcagcactttacccgcttcgatgcccatggttttgcagcgcgccagttcgttttcaccgatacggcggttctcttcgctgtcgcccttcacgtggtgacgagccagcaggcggccctgcatatcgccgtccagcgcgcggatcaccgccgccgaaaccacgccttccggcgcgccgccgatgccgtacagcacgtcgacttcgctatccggcatacaggtcagaatagaagccgccacgtcgccatcggggatcgcgaacacgcgcacgcccaactgctgcagttgcgcaatgaccgcgtcgtggcggggttttgccagcacggtgacggtcagttcgccaagcggtttattcaacgcgcgggcgatgttgcgcaggttctcttccagcggcagattgagatcgatagcgcctttagcgccggggccgacaatcagcttttccatatacatatccggcgcgttgaggaagcagcctttatcgccaaccgccatcaccgccagcgcgttggcctggcccatggccgtcatgcgggtaccttcaatcggatcgacggcgatatctaccgcgtcgcctttgccggtacccactttttcgccgatataaagcatcggcgcttcatcgatttcgccctcgccgatgacaatggtgccgtcgatattgacgaggttgagcataatgcgcatggcgttaaccgctgcgccgtcggcggtatttttatcgccgcggcccagccatttatagcccgccagcgcggcggcttcggtgacacgcgaaaattcgatggccagttctcgtttcataatccactcgttgtgtagaaaagttgcccgtagcgcggcaagaaggacgcgctacgcgttggaatagcgttcggtttccggcatccagcgctcaatcagcgcctgtgcctgcagcggatagcgttcgtgaatatggcgagcaatgcgctgaacatcggggatcatggcctgatcgcgcagcaagtccgctactttaaattcggcgttgccggtctggcgggtgccgagaagctcgccggggccgcggatttccaggtctttctgggcgatgacgaaaccgtcgttgctgtcgcgcagcacctgcaggcgcttctgcgccgttttggaaagcggcgatttatagagtagcacgcagtgggaggcgacggcgccgcgcccaacgcgcccgcgtagctggtgcagctgcgccagacccagacgctccgggttttcaataatcatcaggcttgagttagggacgtcaacgccgacttcaatcaccgtggtggcgaccagcaggtgcatctcgccctgcttgaaggcctgcatcactgtctgcttttccgctggtttcatccgcccgtggacgaggccgatattaagttccggcagcgccagtttgagctcttcccaggtggcttccgccgcctgggcttccagcagatcggactcttcaatcaacgtacagacccaataggcctggcgaccttcctgggtgcaggcgttacgtacgcggtcgataatgtcgctgcggcgcgtgtccgggatagcgacggtcgttaccggggtacggcccggcggcagctcatcgataaccgaggtatcgagatcggcataagcggtcatcgccagggtgcgcggaatcggtgttgcggtcatgatcagctgatgcgggtggaagccctgctgctggcccttttcccacagagccaggcgttgatgaacgccaaagcggtgctgttcgtcgataatcaccagcgccaggccgttaaactgcacctgctcctgaaaaatggcgtgggtgccgacaatcatctgcacttcgccgttggcgatggcttcctgctgcgcctggcgcgctttgcctttctgtttgccagccagccagccaacttcaatgcccagcggcgcgaaccagctgcggaaattattggcgtgctgctcggcgagcagttcggtcggcgccatcagcgccacctgcttaccatgggcgatagcgcgcaaggcggccagcgcggcaaccagcgttttaccggatccaacgtcaccctgcaccaggcgcatcatcggcacgtccagcgccatatcgcgttcgatctccgcggtgacgcgtgcctgtgcgcccgttggtttaaagggcagggaagccagaagctgggttttcagcgtgtcgttggcgctgagcggcagcgcatggtagcgctgggcgccggcgcgaagcgccagcatgctgagattatgcgccagcaactcttccaggataagacgctgctgtgccggatgtttaccgctctccagctcgctgagctgtagcgacggaggcgggcggtgcagcgtacgcagcgcctccggcaggctcatcatcccctgcgccaactccggcggcagcagttcgctaatcgcgcaggtttccagcagctcaagcgcctgatcggtgagtttgcgcagcgtcgcctgcttaatgccttcagtggttgggtagaccggagtgagggtttcctgcagctccggggtactcatatcaccctgtacgcgatattccgggtggatcatctcggcgccaaacttaccgcgtttagcttcgccgtaggccagcacgcgacgaccggtcgccaggctgtttttcatcgccgcgttgaagttgaaaaaacgcatggtcaggatgccggagccgtcgctgatctgacaggtcatcatccggcggccgccgaaggtgatattgctgttgagcacttcaccctctacggttgcgtagacgcccggcagcagttcgccgatttggtacaggtgagtccggtcttcatagcgtagcggcaggtgaagtagcaggtcctgaaccgtatgcagaccgattttcgccagtttgctgctctgtgcggcgccaacgccggtcagcgagttgagcgggacggcatctaacaggcggcctgacattggatttacctcgccgcctgcatcgttgcccaccacgaggcatcggcttcgacttcaccctgctcgttgacgtggggataaggcagccctttttgtttggcgacgcgcgccagcaccgggtaaccgccttcaaatagcagccgctgctgctcttcaggcggcagcatgctattggcgcgttggtacattccagcgttctgccgctgacgctgcgcttcgtaaaggatcaacgcggaggcgacggagacgttcagcgactgcaccataccgaccatagggataatgatgtcctggtctgccagcgccagcgcttcctgggtgatgccggttttctcctggcccatcaggatgcaggtcgggcgcgtatagtcgatttcgcgaaaatcgatggctttgtcggaaaggtgcgtcgcgaggatttgcatgccccggccttttaagtggctgacggcatcgccgatagtgcggtgtgttttcacctgcacccaactattgctgccggcggcggcagaggccatggtgcgcatacggctgccaggccagatggcgtgtacttcgtgtacgccgatggcgtctgcggtgcggatgaccgcagagacgttatggggtttatggacctgctccatgcagaccgtcagatcaggctgacgcctggcgagcatctcgcagatacgcgcataacgctgtgaattcattctacttaatccttcgaactgcctcggcgttagctgcactcactcacccccagtcacgtacttcagtaccttcctggggattcgatttttgtaaaagctaatttcggttacgagtgactttaatcacgtccggcatgacgcgaattttgcgcatgatattcgccagatgcacgcgatcgcgcgcggtcaggcggataaaggcgctgtaaacgcggccatctttttcttccgtattcaggctctgaatattggaagacgcggtgttgattgcggccgtcaggttagccagcgcgccctggtggttgaacatatccaccttaatttcggcgataaattcctgcgcagtttctttatcccattcgaccgccataaacttctcaggctctttctggtagccgcggatgttacgacaggattcatggtggataaccaaccctttgcctgggctgacgtgggcgatgatcggatcccccggaatcggacgacagcacttggcgaaagtaatcagcacgccgtcggcgcccttgatcggcagatggccgtgattcgacgcgttggccggcaccggtgcggcagaggcttcgccctgctgcaggtttttcgccaccaccacgctcatcgcgttaccgagaccgatttccgccagcagatcgtcaagcgtggcaagcttcatgcggtcaagttcgcgctggatgttctccggcgggatttctgccagcttgcggctgccgcctaacgcgtggttgagcaatcggcggccaaggctgacggaatcgtcgcgcttaaggttcttcagcagttggcggatcttggcgcgcgctttcgagctgacgacaaagttcagccatgcggcattcggacgcgcgcccggcgcggtaatgatttcgacagtctggccgctggagagtggttgcgacagcggatagggctgacggtcgacgcgcgcgccgacgcaggcatggccgatatcggtatgcaccgcgtaggcgaagtccaccggcgtggcgccggcaggcagttcgacaatgcgcccttccggggtgaaaacgtaaatctcatccgggaacagatcggatttaacgctctcgataaattcaaacgagctaccggcgctctgctgcagttccagcaggctttgcatccagcgctgagcgcggatttgcgcggtcgtgctgctttcgcccccgtgctctttataagcccagtgcgccgcaacccccatctccgccatctggtccatatcttcggtacggatttgtacctcgaccgggacgccgtgggggccaatcatcgaggtgtgcaaagattgatagccgttcgctttcggaatggcgatgtaatctttgaaacggcctggacgcggcttgtagaggctgtgcatttggcccagcacgcgatagcagatatcgggatcgtgaacgataacgcggaaggcgtagatgtccataatcgagtgaaaacgctgctctttgagcaccattttgcagtaaatagagtacagatgcttttcgcgaccgctaacgcggcaggggatccctgcttcctgtaaacgcccttcgatctcagagaggattttctgaatcatctcttttcggttgccgcgcgccgctttgaccacttctttaatgacgcggtagcggttagggtacagcgcttcaaagcccagctcttcgagctcggttttaatgtgatggatacctaaacggtgcgccagagggctataaatttccagcgtttcgcgggcgatgcgacggcgtttatccgggcgtagcgagcccagggtgcgcatgttgtgggtgcggtcggcaagcttgatgaggatgacgcggatatcctgcaccatcgccatgatcattttgcggaagttttcggcttgcgcctctttcttatcgcggaacttgagcttatcaagtttcgacaccccctctaccagttcggcgacgcttttaccaaaaagctgttccatgtcctggtaggtggcaggggtatcttcaatcacatcatgcagcagcgcggccatcagcgtttcgtagtcgagtttcatctcggccagaatgcaggccaccgctaccgggtgcgtgatatagggttcaccgcttgaacgtgtctgaccctcgtgagcgtcacgtgcaacgagatacgcctgccgaaggcgcttgatttgctcttccggcaggtagttttgaatcagctgattcaggctttcaaacagatacaagggcgacccgctgtgtgattaacgacgaccttcagcaatcgcggtaacggcttgtaattcagcggcttcctgctcttgctgttcctggcgctcacgtacgtcgaggatctggttgttgatcagaccttcttcgatttcgcgcagtgcgataacggtggttttatcgttttcttccggtaccagcggatcctttccgcctacctgcatctgacgagcgcgacgcgcggcgaccagtaccaggtcaaaacggttaccaattttctctacagcgtcctgaacagttacgcgtgccatacttaaaatgctccacaggtgaagaaatgactgggcatgatactgaatgtgggttcagtctgccaatagtttggtgattaaagcgccatgtcgctgcttttggcggctcatgcgcagacgttcagcgcggataatgtttttcagatcgcctaaagcggtatcaaaatcatcattcacaataaggtaatcatattccgcgtaatggctcatttctgcaactgcctgcgccatacgttttgcgatgacttcttcgctgtcctggccgcggccgcgcaggcggcggtcaagttcgtcttttgacggcggcagaataaagatactgcgcgcgccgggcattttattacggatttgctgggcgccctgccagtcgatatcaagaaaaacatcaacgccggtcgccagaacctgctcgatagcttcacgagaggtcccgtaataattgccaaaaacctcagcgtgctcaaggaaagcgtcttcgctaatcatcgacctgaatttatcgtgatcgacaaagaaatagtgttcaccgtgaacttcacccgggcgcggattgcgcgtggtatgcgaaacagaaacctgggaatcgtacaacggttgggttttcaataaagcctgaatcaggctggatttacccgcgccgctaggggcggaaacaatataaagcgtgccttgagccatgagtgtcttttgtatgtgattgtcgaaagagatcctacatacgagcctattatacacgccgccgctgcgtgacgcagtcattgtcacactttttgccgctgtttctttcattttgtctgccgctttcctgatttcttaagcggttgcagcaaccatgcgtaaattctggaaagtcgctcgcagcgtgatgatttgcctgtcgccgcggcttcggtctttagcgcacgatgccgcaaggtagaacaaggagggaaacatgcgcagatggctgatagcggcagcgttatggatggcggcggcaagcccaatggcggcctgcccggcgtggtctttgcaacgcgcggagcaggagataggccacctcagtcggcaaattgccgactggaaagaggcctactggcagcagggcagcagcggggtcagcgacgaggtctacgacatgctctcggcccggttggcgcagtggcggcgctgcttcggtgagaaggcgccgcctgaagacgagctgccgccgccacgcggcgaagtcaagcatcctattgcgcataccggcgtgcgcaaactgcctgatgccacgagcgttggccgctggatgcgcgataaaaccgacctgtgggtacaaccgaaagtcgacggtgtcgcggtgacgctggtttatcgcggcggtaggtttatacgggcgattagccgcggcgacggtctggcgggtgaagactggacggcaaaagtgcgccagatccccggcgtaccgctgaccacctccgggacgctggcgaatagcgttctgcagggcgagatttttcagcggcgagaggggcatatacaaaaggggatgggcggtatgaattcacgggcgagagtggccgggatactgatgcgcaaagcgccgtcggcggcgttgagcacgctgggggtgtttatctgggcctggcctgatggcccggcccagatgtctacccgtctggcgctacttgctgacggtgggtttcctgtagcgcagcgctattcccatccggttaaagattggcagcaggctgccgcctggcgggagcgctggtttacctcgccgctgccctttgtcaccgacggtatcgtaattcgtactcagagagaacccgccggtgacggttggcttcccggacagggggtctgggtggcggcctggaaatatcagccagtttcacaagtggcggaagtgagcacaatccagtttgccatcgggcgtagcggtaaaatagccgttgtggcgcatctacaaccgataaagctggacgacaagctcgtgcggcgggtcaatgtcggttcggtggcccgctggcggcagttagatctcgccccaggcgatcagatcctggtgagccttgcggggcaagggatcccgcggctggatgatgtagtatggcgtggcctgaacagaacgaagccgttggtgcctgatactcgctatcactctcttacctgttttgaaaacaccgatgaatgccgggagcagttcatcgcgcgattggtttggataagctccgagcaaggattaggcattgatagcctgggagaagcaggatggagacagcttgctcagtcgcgccatttccaacatatcttctcctggcttgagttgacggtgtcgcagttggaaaacattcctggcttaacggcaacccgcgcagagcaactttggcatcgctttgcactaacacggcgcgcaccctttcatcgatggataagcgcgcttggtgtgccgcttccgcgcgctgccatgcgggtcttaaaagataattcatggcggctaattgagaagcgtgatgtcacgagctggcaaacgttacccggcgttgggccaaagaatgctcaacggcttgttgagtttattcaccatccggtcatcaagtcgatagtgctaaaacttggtcaactggaggtggacggtttttcgtaatctatagcgaatttctttttactttacgccatggggtcttttggtccggtgcgctgaatgtattgcgtaactggtcataattgaatatatgccgtccgccgtccatgaccgaaatttgcgattcgggttgatagcacttctcgaggagagaatcacaattttcgataccggtgctgatacctaaccaacttaacatcagggcgtagttgttggtggttggccagcgttcgtttacccagccaatacgtcgtttctggttggccagggcgctttggctataccaaatgaactgtggcacgtcataagcctctttactgggattacgggaaccgtgcatatacagtgaagccagatcgggatttttttccagaccatgatcggaaaaataaattagagaagaggcgctattttgtatgcgcttaacgacttcgccgataaaagagtcggtgaatcggatggcgttattgtagcaatcctcgtatttatcaccggtattgagaattgcggcggactgtggatatcggtcgcaggccatttcatggctaccgttaatatgtaaaaaaatgacttttttgcccggcacttttaatgcttcatccagcgcgggaagcaggtcactatcgtattgggtatgtatccattgatgcttttcgctggttgaggcgatcgccacaatatagttattactttttcctgagttgccctgcgcactgatccactcggtataaaagccggattgccgggaaatattcacgatattatcggccatcgagtcggcggtaaagttatccggatcggccttgctgagaaccataggtacagcaagtaccgtggcggaggcaggtgcgatagcgtgtttaaaaataagcgcgttgtgggtaaatgcgctggcaaccggtgtcgtttgctgggagaaaccgtagagctgcatgttacttctgcgtgcggattcaccaacaatgacaacataagtgtcgatgcccgtatcatgtgcctgtagcgcaggatagtgaggcgttgactgcgtaatgtgttcggctagtgaattatcgcgatcggcgatgacgaattcagaagcagtatacaacggagtgttaaccagaattcgcgaactaagcgggtaataaacctctaaatcctggttctttttgatgatgctggagatggagaaatagcccataaagagcgcgagtagaataacgctgatacctttggttcgcgttgatagcttctcgctgagcaacttcaccgcccaccaggtaatcacgaagtagaaagccgctattggcagaatatagaggtacaaaccggctatgcttttcgcttcagaataattagttgccaaaatactcatggcgaaaacggtattgaactcgcttttgtagatatcccaggtactgaaagcgatggcgaaattaagcgtcagggcgctggttaacaaaaagagaatgactttcccggatgtatagcgataaatccacgacacgcttagtaacaaaagcgtgttgcagatggcgatgcgtaatgcaaatcggatgggctgcgtgaaaaaaacaggccagagctggatgaggatagatatcgccaataaggcgataaagtgcccagaaaattttctgttgatggtcagagcaaggcttttagcaaatgacattagtgcttaacatgggctttagtgaaataaggccggtattataagtcttttctgattgttggtgggggctatatgtgccctccagtcaattagtgtgacccatgtcggtaataaaaaaccggtagacctaattttaaacgtatagccagcagccgggtggtaaagccaaacagaagcgttgtgataaccaccacgtcatggtcgcttatgtaatgctgtaaggcgatgtacagaatggccgcggcaaaggagatgccggcgtacagctctttctgaaacactagcggaatgcgcttacagaacatatcacgcagtacgccgccgaagacgccggtgatcacggcggcaatagacgcgattatcggcccttcgcccatatccagcgcgatttgcgcgccaataatcgagaacacaatcagacccagggcatccagcaccagaaacaggcggcgcaggtgtggcattaccggcgcggcgatagtcgtgaggacggcggctaccgccacaataatgacgtattccggatgcttcacccaaccgagcggataatggccgagaaggatatcgcgtacagaacccccgccgagtgcggtagcggtggcgataataatcaccccaaaggtgtccatacggcgacgcccggctgctaaagcgccagtcatcgcttccgccgtaataccaatcagataaagaacatgaagcagcataaatcccccacaatgatgggcaaagggtagcgatttgtgcggcagatcacgattgagtttttctaaagcgagctcatttacatgaaaaaatctaatgcaaaaatgaaggggtagtcccctgatatggggttatgtatatttttcttttttaaaagtgataagaaaaaataatgctggcccgtaaggcgagccagcaggagaggacattactcgatattctgaatctgctcgcgcatctgctcgatcagcaccttcagctcgatcgctgaattggtcacgtcggcattgatggattttgacgccagagtattcgactctcggttgaactcctgcatcatgaagtcaaggcggcgacccacggcttctttcttcttcagaatgttgtaggtctctttaacgtgcgcttccaggcgatcgagctcttcggcgacgtcgatacgctgagccatcaacaccagctcttgctcgagacggttgttttccagctgcacttcggcgtcttcaagcttggcgaccaggcgctcacgctgccactgcaggatttccggcatatgggcgcggactttgctgacttcggcgctgacgccttccaggcgttgctcgatcagcgttttcagtgcctgaccttcggtttcacgggcgacgataaagtcgtccagcgcgccgttcagggcgttgaggatttcagcggcaatcgcatcaaggtcctgttcttgcgccgccatcactccaggccagcgcaggatatcaaccgggttgatctcgccttcatcgctctgcatttttacccagttcgcggcgttcaccagctgcttcgccaggttctcattgaggatcaattcaccctgggcgctgggatcctgttcaaaacgcagggtgcattcgattttgccgcgagtcagacgagagcggatgcgctcgcgaaccacgggttccaggctccggaactgctccggcaggcggaagtaggtttccagatagcgttggtttaccgagcgcagttcccacgcggcgctaccccagtcacccttgatttcacgccgggcataggcggtcatactgcggatcatagacgttcctgttttttaaggagagtggggaggattatagctttcgaggctctttcaggataggaataagcgcgcattatccgcatcggcaggcgtgcgtcgtcgcgatgcaacttggtcgaatttgtgtataatgcgcagccacattcgtttcaagccggagagtaatcatgcgtccagcaggccgtagcgctaatcaggtgcgtccagtaaccctgacccgtaactatacaaaacatgctgaaggctccgtgctggtcgaatttggcgacaccaaagtgctgtgcactgcctccatcgacgaaggcgtaccgcgcttcctgaaaggtcagggccagggctggatcaccgccgaatatggcatgctgccgcgctccacccatacccgtaacgctcgcgaagccgcaaaaggcaagcagggcggccgcacgatggaaattcagcgtttgattgcccgcgcgctgcgcgctgcggtggatcttaaagcgctgggcgagttcaccattacgctcgattgcgatgtgctgcaggccgatggcggtacccgtaccgcgtccattaccggcgcctgcgttgcgctggccgatgcgctgaacaagctggttgctgccggtaaactcaaaaccaacccaatgaagggaatggtggccgccgtttctgttggtatcgttaatggcgaagccatttgcgatctggagtacgtggaagattccgccgcggaaaccgatatgaatgtggtaatgaccgaagacggtcgcatcattgaggtgcagggtacggcggaaggcgagccgttcacccatgaagagctcctcactctcctggcgttagcgcgagggggaatcgaatctattattgcgacgcagaaagcggcgttagaaaattaatgattaaggcgactgagaagtcgccttttttttgcgctttatccctcattacacctgcgaaggatagggcgcgtagtccgacaatgatgacagtactaaaaggagcgaatccatgaagccgtatcagcgccagtttattgagtttgcgcttagcaagcaggttcttaagtttggcgaatttacgctgaaatccgggcgtaagagcccctatttcttcaacgccggcctgtttaataccgggcgcgatctggctctgctgggccgtttctacgccgaggcgctggtggattccgggatcgagttcgacctgctgttcggcccggcctataaaggcatcccaatcgccaccactaccgccgtcgcactggctgaacatcatgaccgtgacctgccgtactgcttcaaccgtaaagaagcgaagacccacggtgaaggcggcaacctggtcggtagcccgctacagggccgcgtgatgctggtggacgacgtgattaccgccggtaccgcaattcgtgaatcgatggaaattattcaggctaatggcgctgagttggccggtgtgctgatctcgcttgaccgccaggaacgcggccgcggcgagatctccgcgattcaggaggtggaacgtgattatggctgcaaagtgatttctatcgtcactctgaaagatcttatcgcctatctggaagaaaagcctgagatggccgatcatctggcatcggtacgcgcttaccgcgaagcctacggcgtctgatgcagaaaccggcagcctggctgccggtatagccagagcacgctgagaaggtgaatgcatgagtcatgcagccttgcggctgcatattgagatttattgcagttgcgcggcgaccagcggccagcgggcatcgaaatcatccgtagggcggtacttgaactcgctacgtacaaaacgcgacagcatgccttcgcaaaatgctagcagctggcttgccagtagcgtctcgtcgagggtgtagccttctccctcacgcattttcttttcacgcatcacctgacgcaattgaacttcgatacgttcaaatagctggttgatacgaccctgcagacggtcctgttcgaacattaaggcgtggccggtgaggatacgcgtcagcccaggattacgctcgccaaacccaagaatcagcagaacaatcaggcgcagacgagccgtagtgtccttttcatctttcaaaatcaaattgatgcgcgtaatcagactgtcttcaatgaactcgatcaggctgtcaaacatgcgggttttactgggaaaatgacggtataacgccgcttcggaaacaccgacggaggctgccagtttcgccgtggtaatacgttgactaccatcgctggattcaagcatcagcgccagagactgaagtatttcttcgcgacgattccttttcgcagtttgtttttctgccatgttttaaaatacccctgaaaataagcacttgtcaggcaggcatccacaaagcgaccgcaaaccttagtttgcggtgatgttattgcattatgcgctttgggatgcgggttccgtatagccgggcttatttgcgccctgagtggccgaagccgccttcgccgcggtcggtggcgtcaaattcttccaccagattaaactccgcctgtagcaccggcacaaagaccatctgcgcgatgcgctcgcccggctcgatagtaaagctctgctggccgcggttccagacggacaccatcagctggccctggtagtcggagtcgataagtccgaccaggttgcccagcacgacgccatgtttatggcccaggccggaacgcggcagaatcaccgccgccagagacggatcggcgatatgaatcgcaaggccagtcggcagcagggtggttgcgcccggcgccagctctacggcgtcgtcaagacaggcacgcaggtcaagtccggctgagccggaggtggcataggttggcaacggaaattgcttgccaacacgcgggtccagaatcttaacgtcgatttttttcatcataacgggtaacgatctcgtcgagtaataattggcccaggaattccttgcgctcaagtggtaagcgcttatccccatcctgccagaaaaggtgtaatgcgttgttatcgctattaaaaccttgatttggctgagaaacatcattggcgcaaatcaggtcgagatttttacgggcacgtttttgccgggcgtattcttccacattatttgtttcggcggcaaatccaacaacgtacgggcggttgttttttagtgcagcaaccccggcgacgatgtccgggtttttgaccatttttattgttaattcatcgccttgcttttttattttctcgtcggcgacgattgctgcgcggtagtcggcaacggcggcgcagccgatgaaaatatgctgctgctgcgcaccgttttgcaccgcagcttccatttccagcgcggtgccaacatcgatgcgttgcacaaacggtggcgtcggcagcgataccgggccgctaaccagcgtgacgttcgcaccgcgttgtgcggcggcggcggcaatcgcgaagcccattttgccggagctatggttggtgatgtagcgcactgggtccagcggctcgcgggttgggcccgcggtaatcatgatgttgagatgttgcaaatctttgacaggcgagaaatgctgcgccgccatctccacgatagtgagcggatcgagcatgcggcccgggccaacgtcaccgcaggcctggctgccgctatccgggccccataccaataggccgcgtgaggcaatagtggcaaggttgtgctgggtggcggcggcgcgatacatctgttggttcatcgctggaacgacgaccaccggcgagggcgtagccaggcaaatcgtggagaccagatcgttcgccataccggcggcgacgcgggcgattaaatcggcggttgccggggcaaggataaccagatcggcccacttgcccagttcaatatggcccattgccgcttcggcagccggatccagcaggctatcggagaccggataaccggaaaccgcctgcaggctcaacggggtaataaaggccttggcggcttccgtcatggcgacgcgtacatcggcgccgcgttctcgcagtcggcgcaccagttccggcgttttataggcggcgatgccgccgctcacgccgagaacgatctttttaccagccagactcatcatgattttgtcctgttgaaatacaccagaatccgcgcatcttatcacaatcccggtggcatcgtgcgtatgccggacactcactttgcgaggggctacgcaggccttgaaatcaccggtcggcagctcgaaaagggtatgccaggatgggcgaggaacgggaaaggagacagggtaatggatatacaggaatcattgatgccgcgggaaaaaatgctgcgcgacggtattgaaacgttgagcgacgttgagttgctggcgctgtttttgcgtaccggcacgcgtacccaggatgtgctgactttttcacacagcttgctacagcgcttcggttcgctgtacgggctgttatcggctgagatagaacaatttgcagatatcgacggtatcggcattgcgaaatatgcgcaacttaaaggtattgccgagctggcgcggcgttattttagcctgcggatgagagaggagccgtcgctggtcacgccgctcatgacgcgagaatttttacaaagccagctcgccgatgaagagcgggagatctttatggcgatctttttagataatcagaaccgggtattgaaacatagccgccttttttctggtactcttagccacgtagaggtgcatccgcgagaaattgtacgcgaagcaatcaaagtgaacgccgccgcggtgatccttgcccataatcatccttcaggtagtcctgaaccgagtaagtcggataagttgatgaccgacagggtggttaagtgttgtagattcatggagatacgcgtgcttgatcatctgattattggccgcggcgcgtacgtctcttttgccgaacgtggctggatttagccccgatcatgcgatctatcgggatctttgtctgttcgggacttgagcacaccgccgagtcagcgtatactacgccacctttgagaatctcgggtttggcatttgggcctggcaatcgagagttcaatagaactatgcgatgaccgggctgtaaagcctgacgaggcgccaataccccatacgaagctcgagctaatttgatttttggagaatagacatgtcccgagtctgccaagttactggcaagcgtccggtgaccggtaacaaccgttcccacgcactgaacgcgactaaacgccgtttcctgccgaacctgcactctcaccgtttctgggttgagagcgagaagcgttttgtcaccctgcgcgtatctgctaaaggtatgcgtgtaatcgataaaaaaggcatcgatacagttctgtctgaactgcgtgcccgtggcgaaaagtactaagtacttagaggaaataaatcatggctaaaggtattcctgagaaaatcaagctggtttcttccgctggtactggtcacttctataccaccacgaagaacaagcgtaccaaaccggaaaaaatggaactgaaaaagtacgatccggttgtacgtcagcacgttatctacaaagaagctaaaatcaaataattttagtctccttgtactaaaaccccgctccggcggggttttttgttttatgcttcatccttcgagctacaggtgcgttggctgcatgcgttcagtctggccgcttgctttattaagccttccggcctctcttcccgctgcctccctgtcacccgaaactgtgtggttaagaggaaaaaaatgcctgaattacccgaagtcgaaaccagccgtcgcggcattgagccgcatctggtgggcgctaacatcctgcatgccgtagtgcgcaacgggcgcctgcgttggccagtatccgaagagatttaccgcctcagcgacgaaccggtgctgagcgtgcgccgacgcgccaaatacctgctgctggagctgcgtcacggctggatcattattcatcttggcatgtccggcagcctgcgcatcctcagtgaagagcagccggctgaaaaacacgaccacgtcgacctggtgctgagtaacggtaaagtgctgcgctataccgatcctcgccgctttggcgcctggttatggactaaagagctggatggtcatccggtgctggcgcatctcggcccggagccgctaagcgatgaattcaacgccgactatctccagcagcgttgcgcgaagaagaaaaccgccattaaaccctggctgatggataacaagctggtggtgggcgtggggaatatctacgccagcgaatcgctgttttccgccgggatccatcccgatcggctggcctcgtcgctctcgcatcaggaatgcgagtggttagtgaagatgattaagctggtgctgctacgctcaattgagcagggtggaacgacgctgaaggatttcctgcaaagcgacggcaaaccgggatatttcgcccaggagctgcaggtatatggccgcaaaggcgagccgtgccggatctgcggcacgccgattatcgccagcaaacacgctcagcgcgcgaccttttattgtcgccagtgtcagaagtagtggagagggttggggattatgcccggccagataagctggcagccccgctacgcgcagcgcgagcgggggcaggaaatgctacttcagcttatttaacagcgcctgatgtacgttaggcggcaggaagtgggagagtcgccctggtggcgcgccacttccttaaccagcgatgaagagataaacgaccactctttgcacggcatcaggaacacgctttccagcgtgggcatcaaatggcggttcatgtgcgccagctgcatttcatattcgaaatccgccactgcccgcaggccgcgaattaaaatattcgcctgctgcgcgcgggcgaaattggccatcaaatcgctgaagccaatcacctcaacgttgaccagatgcgccgttgcctgctccgccagcgcaatgcgttcatcgaggctaaacattggttttttgctcgggctggcggcgatggccagcaaaaccttatcaaacatacccgccgcgcgggtgacgatatcgatatggccgttggtgatagggtcaaaggtgcccggatagatcgcttttgtgcccataattacactttctccgagtagccgcggctgagtgcccacagctcggtgtatttattaaacgtgtattgcgcattgactaccgccagcagccacccctgttttccatccagcacgccgccgcgcagcagcagcgttttcacgaaggctcccagcgtatggctgaaaatccccgccatcgaggttgtcttgcccttctgatggcgctcaagcgcccaggcggtggcatacgccagctgtttctgctggaagccggagaagtcgcggcaggtcaggtgcagcagatcgccgctgagcggcacgacttcggcgccgaggctatccagagattcatgcaccagattatcgttatagcggtaacgcgcgcgttcgtacaggcgcatcacccgatcgggataccaaccgctgtggcgcataaaacgcccgaggaagtagttacgccgggcgatactgtagataacgccgcgctgcggcgcgtccagtaccttgagaatagccgctttcagttcaggcgtaacgcgctcgtcggtatcaatcatcagcacccagtcgtgagtggcgtaatcctgtgcgcgctggcgctgaatgccatagcctcgccagtcggtattgctatagacccgcgcgccgaggctacgggccagttcgacggtattgtcggtactgccggagtccagcaccaccacttcatccgcccagcttaccgacgccaggcaatcggcgagcaggtcggcggcgtttttggcgatcatcacgacggagagtcgggtcgacattagtggctccgctgcggcaggtagggttgcagtaactgtagcagacgcgacagcgcgccctggttttggtgcagcacttccaccgcgtggcggccgtaccacagtcgataatcttcgtccgtcagcagggtagaaacctctctgaccagcgagtcggcgtccgtgacggtgatcaggccatcatcctgctgcagcttggcgcagatatctttaaagttgaaggtatgcgggcccatcagcaccggaatagcatgggcggcgggttcgagcgggttatgcccgccacgttcaaccaggctgccgccgacgaacgccaggtcggcaatgccgtagagcagcatcaattcgcccatggtatcgccaatcaccacctgggtgctgttcgacggaatttcaccggtgctgcgcatggtgaagctcatcccggccttttgcaccatatcgcgagcgtcgccgaagcgttccggatggcgcggcacgaggatcagcagcaggtcggggaaggtttccagcagttttttatgtgcctgcaggatgatttgttcttcgccgtcgtgcgtgctggtggcgatccacactttacggtgcggcgcccactggcgacgcagggtaacggcgcgggccgccagttccggggttacggaaatatcgaatttcaggctgccggtcaccgccagttggttacgtttgaggccaagcgcgaggaagcggttgccgtcctcttcattttgcgcggcgataagcgtaatacggcttaacaggcggcgcatgaagccgccgagtttggcatagcctttcgcggaacgctctgacaggcgcgcgttggcgataaccagcgggattttacgtttgtgcagcgcggcgaccatgttcggccacagctcggtttccatcacgatgaccagtttcggctgtacgctgttgaggaagcggttcatggcgcagggtaggtcatacggcagatacacgtgatgaacatctttaccgaaggcagacatcgctcgctctgagccggttggcgtcatggtagtgacggtgatgggcagtgagggatagcgatggcgtagcgcgcgtactaacgggatcgccgccagcgtttcaccgacggagacggagtgcagcagaatgccatccggcactaccttgttttgacagaagccataacgttcagcccagcgttttcggtaggccggcgccttacggctgcgcagcagcagtcgcagccacaccagcggctgaatgaggtagagtagggtggtataaagcaattccaaactatttatccgttttaggttttttgcgggcaaattctaagcatttaacccgcgtaaagctatctctttggcgctttcccagtccttttgttgtcttccatacccgatgttggcaaaggtgggcaatgattgcccaccttctatacgccgcagaattattgttccgcaggagggagtgcattcaaatgataggttacacgctcagaaagaccgcgaatatcgccgccagtaataaagtaactgtcatctttcagattagggttttcaatggtgtaccctaacattttgttgatcagcgttgccagttgatagtggttcaacggcatctgaggcgcaatattgtgcattgaataggccgggtcgttactaaagtagaggaacggaacctgcgcgattggcattgaaacgatagagtggccaaataagccgccatcgccgacgcgttcaccgtgatcggaggtgacgaagaccaggacgggtaatttcgacttggccattaccgtgcgaatcgccgaggccagttcacgatcgtaaaggcgaaccgcgtcatcatactcgtttttcttctgggtgacttcatcgccggcttccggtgttgagaagcgggcaaatccctgcggaatgttgcggtcgtaagggatatgtggcgcccggctgttaagaaccatcaggaacggcttcgcccagttaatatcggctttttctactgagggggtaagaaccacatcagcgccgatttctggcgccggtcgcacctgtgtatcttcccacaggttgagcgcgtggatgccaatccagttacttaagccttccagcccttgggcagagataaatgccgtttgataaccacccttctgcgcattaacaaaaatgttcgctgatttattcttgtaggcggcgtagttgtcaggctcgcgcaggttattgaccaacatcggaatagccacgcgagtagagacggcattggagacgattagccgtccggttccctgatattgctccataagcgctttcaattcaggggtggtatctcgttcataacccaacgcgctaatgtggtgcgggttcaggctttcaccgatagcgagaataatagagtagcggccgacctggctttgcgggatcggcgtgactttatacggctcgtaggttgttagtttctggttatcaccggaaatcgcctctggtatcaggcgaatagcgctgtagctcatggccgaaaggccgttacgcagaagcgagtgacgcagatccgggttgaacttatacatctggccgttgatcgctttgtaaaactggccgacaaacatcaccagaatcgctaccagacatggcacggccagcagcttaggccactgcggcgcaaaacggcgcgtaaagaacagggcaaaaacaacagcgataaacatgataacgaagtaaattcccaacgtgccgaggctgtcggtaatgccgctggcgatatctttggtttcgacgaacgccagccatacctcgcttgggccatagaactggccataaaactgatagtaaatcgcttcgctaatttgcacgatgaaggtaatcgccaacagcaagcgggtgataaagaagcgtatacttaccgccgccagcagcgaaataatcagataaagcgagaggtctccagccttcgggctatagacgtggtcctttaacaggataatgatttctggcagcgcgaacagcacggcaaaagcgaccgtcagcagtaatgtacgtataagattgcggtgtaaagtcatcatcgtaactcagtactttttggtcaaaggacgaatcgctttgccaaaaccaaagcggagggcgcggaccggcattgaacgtgcattcaaacccttgcgccagatatcttcaaaaagcgccatccaacgggcggcaacggcttcccttgaatagacctgaagccgtttctccccttgttcgcgcatcttttgatagagctcggggtcgttctttaacttcatgatcgctgcgaaggcttcgtccggattcttagctatcagatagtcgagttcgctttcgcgaattgcccggaacgattgttcatcgtcgcaaatcattaccgttttgcccaaccagttattgataagcttgctggccggtttgcgcgctagcttatggtcgtgtgatttacggaaactcacacaaatatcgacatcgcggtagtctgtccagttgttgaacgagatacgcaaggcaataccttgttcagccaggcgttgtttaaattcatcgctttgatattccgccgggaagctatcgacgcgcccgaaataggccacggtttgaatagtgttatccgtgcgctcgcgcggctgaacacccggctgcggccaataagggacgaagatacgattactgtgaccgtcaacttccggattttggtcaacgacataatccgcgccgataaccggtggtcggtcagcgcgcgcgacgacggtgacacctcgccagggcttgacgcgagaaccgaaatcatcgttatgcatcagattgatagcatcggggcggcattcagagccgaaagagcattctatcgcgtcgccataataataattgagggccagcgtcgtctggaatgtccagccaccgcgtcctccgcaataaaaacgctctggaatggtgttgggatcgacccggttatcgagcagcgtctggaagtcagcataatttttagcgataaaatcgctgcgagaaacggcgtgcaatttaagcttattcataggttcgctttatttgaccagtttttttaaacgaaaataacgacgtcccagacgccagcggaggcgtaatccacgcgcatttttccagatcatcgaccagatgccgcggtcaaagagttcttgcgtaatttccctttttttggcgaggtcttcgatattattgatgctatgcagaatacctaaaccctctttagcgatttgccaatgacagccgggaacgcgtttcacctgttccgggtagcgctgattaatggcatccagcattgtcagtattttcatatagtgacgtgaagagcgcatccgcgtatcgtcggtaccaggggtatgggataccgaagctgagtggatcagataatcataaaagacttcatcgatgtactgcacgcgtttggctaccagcagtatttcggtcgtccagggaatatcctgatggcgtagccccggttcgaaagaaaaattattttctttaatcagcgcgtggcgataaatatttagccaggtgacgtgcaaaaacttgcgcgactccagcgccatatttagccaatccggcccctcaaggacgccagtggacgcaagacggtctgaagggaatatttttttgctgggacgcccatcatcataaatgtaattaccgttacaggtagcgacgtcaaggttgttctggtgggcgatctccagtaaacgggaatacatccccgggtagattacgtcatcgatatcggggaaggcgacatactctccccgcgctaccgcaagaccgctattacgtgccgcggacacgccgccgttggcctgatcgatgacgtggaactgggcaaactcaccggcgtagtggttgataacagaagcagagttgtccgttgaaccgtcattaacgacgatgatttcaaggccgctaatttgctgagcttttatgctgtcaaaaaatgcgctcaggaatttctcaccgttataaaccgcgacgataaggctcaggacaggaatgtctgacatgcttactccgtgataaaagcgggacgtctagtgctacgcttggacactgtttgtgttgcagagttcggatatgaactgcgccagcgctctctattatctatgatgcgataaagaaagccactggcgcggaggtatggttagtcgtttggcgaataattctcacgcggtcgcagcgcggcgatgccgatgagcaaaccagtcaacatcatatattgctcgagataatggtctttgagattgtggtcgaccatggttcgcgagaagaagccgatggtaaacagcagcaggaataacccaaccatagttttaccatggcggaattcacgccagccgatataccagcagcccgccagtaagataagccagccggcaatcccgaccacgccgttctgcaggccaaattcgattagcccataatggctgtgcggaatcgtaatatgcatatcctgagtatcgcgacgcagaatatagcgaaacgcctctttgcgagggccaattcctgccgggtgctcgccaacaagcttccagccttgatggaagaagctggctcggcagccgttagagtgatcgatctctttaccctgggcgttgagcgggatagtgccgtcaacgcggttatagcagaagctggtaaatggcgcgttccagccagcgaccgcatcgctttccagactctgccagcgcggatcggttttccaggaggcgtaaccgaggaaaatcgcggagcagaacagagcgactaacaggcctaaagtaagtacgacgcggctgcggcgctgggcgttcaggctaagcaggataaaggtcgagaacaggctgccgaccagccctattgtgccccagcgcgtatcaaccagtgcggtacagatgaggttagagatcaacaacagcgtaacgatcggggtattcagacacaggaagcgttttttgattaacgctcgggccagtaattccgccagcaggaagccggttatcatattgacctggaagctcatacgggtgcggttataaacaatccgcgtttcgccccagtggatatagccatcgcgccagtacagccaggcggaatccaggagatgaatacaaatcacgccccagaaacacagcacgatcagtgtgaacagccgtgcgctggttagggaagggaactgggtttgcagtaccggcatcagaatcagaccggaacaaaacagcaggaccgggcgcagccattgtccatcccaggtaccgaccatttcttttagatccggggcgacgaacaggccgttgaacaagatataaagcgttagtagccagagggtaatcaatacaaactttatttggtgtgtatcaagcttctggcgagcggtgcggctggtaaagaataggccgaaactgcataaaataatggtgtagataaaaccattgcggttgaaaaggagttggtcgttaggaatcggccagacaaaacataatgccaggacgtacaaaaacgtcagtcctgcaaaaaaattacgggttttagtcatagtttagaggcgggtttgacaaaccagctttccggcagcgtgagttaacaatatgacagaagctgaaatgccagccaccgtcaataatccgtggatgggaaaactaacatacatcgtacttatgaagaagagggataattgtaagcggtcgcgcattcctcgttgcgttcctcacagaccatgcacatctccgctctcgatgtatatactatcgctccactgtcaggaactggaaaagtatgcacatcgttcacactgaagccgatggcggcaagggcggccagcctctgcgcatcattaatgaatcgttaggtatggtggcccggggtcacaccgtgaccatactgtgcccggaatctgcgccgttgcatcagatggcgcaggcggcaggattaaccgtcgtcacgatgccattaaagcgtaaaaatctgagtaatctgatgcggctgcggcgctggctgttggaacagggtaataatattgatgttattaacagccataactcagccgatacctggctggtggcgttggctaacttgactctggcaaatcctattccgttagtacgtacgcgccatgcctccggcgtcccgcgtaataactggacaacgcgttggctgtttcgcaccgcctgtgcgcacatcgttacgactggcgaagcgcttcgtcatcaaatgacggcactgggcgtaccgcttgaacaaaccacttcagtaccgagcggtgtggatacgcagcgtttctatcctgatgacaaatatgatgcccgagcgtattgcgagctctcgcagaacgatttttggctaggtgtcgtatcgcatctgcgccctaacaaaggccacagcgtgttgctgaaagcgttagcgcaaataaacgatcccacggtgaagctggcgattgtcggtgaggggccgcaccgtgaggccctggaggagcagattattcagctcaatctgctatctcgtgtggtgatggcaggacatcgccctgacccgcagcgctggttcccggcttttgatgtggcaattagtccttctcatgatatggaaggcgtgccgcagggggtcttacagtctctggcttcgcggatagcgacgattgctactgatgctggtggtactggtgatgcggttatcgaccgccggacggggttacttattgcgcagaatgatgttgatgcgctacgggaagcgatcgttactctctatcaggacgcatcactgcgccgccagttagcggagcagggctatgagtatctcacaacccattttactcgcgaatgtatgttagaggcgatggaaagcgttttccgctcggcggctcagcgtaaaagatcgcgataaagcgcctgcagttcttccgccatgcgttcaagcgtatagggggcggcggtggcgcgtgcgttggccgcaaaatcaacgttgcgctcgcggccctttaaccattcgccgatggcatcctgatagccaatgacgtcgagcgcatcgcatacccagccgttgatgccttgttcaatccactccgctgcgccacagccgaaactggttagcagcggtagtccgcaggccatagcctcgacgcagacgttagggaatggatcgtacaacgtaggtaagatcagagcgtcggccgaaccatatacctggcgtacatcggaaaccggaccgagaaatttgacgcgatcggtaatcttcaaccgcttcgccagcgcgctaaaacgatgcgcatgtttatcgcgcccggcgatcagcaaccaaacgtcagcatgagcggcgacggcgcgcagcgctgtcgcgacgcctttccgcgaaaatcctgatccgacataggccagtaccggcgctgactcggggatccccagtgagctacgcagggacaacgctttaacgtccggatgaaaatgcgcggtatcgacaccgttgtagataacggttagccgatcgtcggcgagttgaaagcggcgcgcgatatcatcgcgaaccatttttgaattacagataactttgcgtaacgcggggtgtgtgaacatctcccgctcagcgctgagaatatagcgatggtaatggctaaaggactgcgccagacgagagagcggcgaaaggatacggttatattgctcaagccaggccgcgtgcacgccatcgccagcgcggaagatcgtcgcaccggggatgcgctcatggcactgtacgatatcaaagtctgcgaaatgagcggcagcggcctgagcgaagccgcgttcacgtaccgtgcggttacggaaaggaggatttaccgtcaacgttttccagtttgccgactcctcccatgagcgggcgatcagcgtgacgtccagcgcggaatcctgcgctaacacgttaagcgcgcgcgagacaaaacgctctgcgccgccgttagggttccaggtttggcgaacgatagccagtttcatcatggagattccagtaacagagtgtcaatcgcgctcaggacttgctgcggagtaatagcagtgatgcagtccgaaacctgactgtcgccgcagccggctttgccgcacggctggcaggtaaacccggcggtaatcacacgatatggcacgccccacggcgaccacttgatagcgccggttgggccgaaaatggccaccgtcggcgttccgaccgcgctggctaaatgcatcggcattgaatcaacgccgaagtagagacgggcgtgcttcatcaaggcgccaagctctttcagatttaactgtccgctcaaatcgaaaaccggctgggtgagagcggcgcgtaactcgttcatgtaggccgtttcttctttcgacggcgcggcagaaagaataacaggcaatccgcgagcggccagggtgtcaatggtccttgccagtttgtcgatttgccaggccttaaacatccagcgcgaggtcgggtgcaccagaatataggatttactgctaaggccgaaggcgtcgagtttttcagcgatcgatttctctgccgcctctcctggtacaaagagcgtatttttgtccgccgcgttttgcgggtggataccgatacggcgcaacgcatcgagattcacctcaaccatatgacgagagttatcctgaatcgccggatacagcgtggtaaatgattttacccaacgacgacgcgccaggccgctgcgcttatcgggtttgaaaccgaccgacacgcggggcttcaggcgacgcgccagacgcgcgccgtgccagtgttcggtcaggttaatcaacacgtcatactgacgcgcttttagcgtattgagcagttcgcgatataagcgaaactgcgcgagccagcctttttttcgccactggcggccaatcgtatgcacctgattaatatacggatgactggtcaacatcgcctgagtatcgtcatacaccagggcatccacttcggcgtctggccagttttttttcattaccgtaaagactggagatgttaaaagtacatcgccatggtggcgaagcttgatgatcagcacgcgtttaggcggacgttgctctgaaaaaaaatcagacataggctttctctgctaccagcaatggctctatttgtgcaaaaaccgcagcagcgtctaaatcggcaagctgcgatgagttaaccgggcggataatatgctgatttttaccatatccgccaatcagtcccggatcggttgggccgtagagcgtgaaattgggtttatcgagcgcggcggtcaaatggctcaggccagtatcgacggaaaccacgccgcgtgcgccagccagaatctgggcgacctgctcaagactcatgcgcggcaatacgtcgacgttcttgcgcccttccgccagccgttttgcccgcgcctcttcatgcggcgcgccccacggcagtttgatccgtacggcgctatctgccagcagatcgagaagctcttgccagcgcgcttccggccagtgtttatcatcgcgggtggtggcgtgcaggaagaccagatacggctctgctaccggtgagtcggggcgaataaagtggcgcgcgatggcgtaatcaccctgcgtctgcggccgggcatagccgaggcttttggcgaacagttcgcgcgtacgctctaccgcatgctgttgaacggcgatatggtggcgacggttataaaacaggctcgccagcggctcgcgggcggactgccagtccatgccatgtttaatgccatgcgccagacgcgtcaccagcgcggcgcttttcaccagcccctgggcatcgataatagcatcgtagttgacggcctttacggcctcgcgaaaggcttttctttccgctttgataggcgcggaaaaccaggctttgcgccagcggcgaatcgccaccggaatcacccgctcgacggtctcatgccatgaagggatctgtgcgaagccctcttcaaccacccaatcaaagcggatgccgggaatggcctgcacagcatcggttagcgcgggcagcgtgtgtagtacgtcgcccatggatgaggtttttacgatcaatacccgcatccgttacgcttcctcgtgctcggttttttccgctaacagttcgttcagctcctgcaagacgcgttctggagtgatgtcgatcaggctctgatgataaccttcagcggcatcccctttgcgcactttgtggtagccgctaatcaggcgaataacccgtgctttgtgcgacagcggcggggtaaagtccgggctgctcgggccgtacagcgccaccagcgggcggtccagggcggcggcgacgtgcatcagccccgaatcgttgctgaccacggcctgacaggcggcaatcagaatcacggcctgttccagctgggtttcgccagccaggttacggcaccaggcctgctgctcgctgctgagcgcggcgatgatctctttgccggcatcgttatcttttgctgagccgaagagcgctatctgataaccatcgtcaatgagctttttcgccaacgcggcgtagtgataatgcggccagcgttttgcagggccgaattccgcgccggggcagaagccgataattggccgatcgtttgagagattaaaggcgttgcaggcctgtgatttttcgccgtcgttgacctgcaggtgcggccacagcagcggctgtggaaggtctttagcgcagcgcatgacgccgttgtcgtaggccagcgctacgtagcgctccaccatcagcggccaggcgtctttatccagcacgcgggcgtcgttgagcaggccgtagcgcatttcgccgcgccagccggtgcgcagcgggatgttggcaaagaaaggcaccaatgccgatttaaacgaattcggcagcacataagcgcgatcgtaacgacgatcgcgcaggctgtggccgagtttgcggcgttcgccgatagccagcgcgccgtggcccagcggcatggcaatcgcttcattgacttccggcatgcgcgataacaacggacggcaccatgccggcgccatcacgtcgataatcgcctggggatagcgcgccctgagcgtacgataaagactttgcgacatcatcatgtcgcccacccaagacgggcctatcaccaatattttcatgcttgtttcttacgcgtcgcggttgagccaggccatatattccgttacgccttcggcaacggttttgaacggtttgtcatagcccgctttacgcaggttagtcagatcggcctgggtgaatgcctggtagcggcctttcagtttgtccgggaacgggatgtactcaatgctgcctttcttatggtacgccagggtcgcatcggcgacggcctggaaggattccgcgcggccagtaccgaggttgaagataccggaaacgccattttcccagaaccacaggtttaccgcggcgacgtcgccgacatagacgaagtcgcgtttgaatccatcgctgccttcgaacagtttcggattttcgccattattcaactgggtattgaggtggaaggccacgctcgccatgctgcctttgtggccttcgcgcggcccgtagacgttgaaataacggaagccgacaatctgcgaatctgcttccggcaggatctgacggacgtattcgtcgaacaggaattttgagtagccgtagacgttcagcggtttttcgaattcgcgggattcgataaagtcgctggtgcgcccgccgtaggtagcggcggaagaggcgtacaggaacgggatttcacgctccaggcagtagtgcagcacctctttggagtactgatagttgttatccatcacatacttgccgtcccactcggtggtggaagagcaggcgccttcgtggaataccgcttcgacctcgccgaactcttcgccagccataatctggatcagaaaatcttctttatccatgtagtcagcgatgtccagatccaccaggtttacgaatttggtgccgtctttcagattgtctacaaccagaatatcggtgatgcctttgtcattcagggctttaacgatgttgctgccgataaagcctgcgccgccggttacgatgatcataactgtacctttgaagtagagggtccggagacaatccggacacgaatactcatatcatatcactacatccgaaaggcttcagccattcgccgaaaaggtgctggccgcgcgtgatttatgctgcaaataattcattcaggcatgcatcatctcgtatcaacgtatagctttgggtaatatgtgccaaattttgccgaatctggagagttgcaatgcgtggtgatttctacaaacagttaaccaatgacctggataccgcgcgcgcggaagggttgtttaaagaagaacgtatcattacttcggctcagcaggcggacatcaccgtcggcgacagccacgtcattaacttctgcgccaacaactacctgggcctggcgaaccacccggaactgatcgccgcggcgaaatccggcatggacagccacggcttcgggatggcctcggtgcgcttcatctgcggtacccaggacacgcataagcagcttgagaaaaaactggcggatttcctcggtatggaagacgcgattctctactcttcttgctttgatgccaacggcggcctgtttgaaacgctgctggggccggaagacgctattatctctgatgcgctgaaccatgcgtcgatcatcgacggcgtgcgcctgtgtaaagcgaagcgtttccgctatgccaacaacgatatgcaggagctggaagcgcgtctgaaagaagcgcgcgaagctggcgctcgccacgtgctgatcgccaccgatggcgttttctcgatggacggggtgatcgccaacctgaaaggcgtctgtgacctggcggataaatatgatgcgctggtgatggtcgatgattctcacgccgtgggctttgtcggcgaaaatggccgcggttcccatgaatattgcgacgtgatgggccgcgtcgacatcattaccggcacgttgggtaaagcgctgggcggcgcgtcaggcggttacaccgcggcgcgcaaagaagtcgttgagtggctgcgccagcgttcccgtccttatctgttctccaactccctggcgccggctatcgtcgccgcttctatcaaggtgctggagatggtggaagcgggcagcgaactgcgcgatcgcctgtgggctaacgcgcgcctgttccgcgaaaaaatgaccgccgcaggctttaccctcgcaggcgccgaccacgcgatcatcccggtgatgctcggtgaagccaccatcgcgcaggaattcgcgcgtgaactgcagaaagaaggtatttacgtcaccggtttcttctatccggtggttgcgcgtattcgcacccagatgtcggcggcgcatacccctgaacaaattgaacgtgcggtggaagcctttacccgcatcggcaaacaactgggcgtcatcgcctaataagggtgtgagatgaaagcgttatccaaactgaaagcggaagaaggcatctggatgaccgacgtaccggaaccggaagtcggccataacgatctgctgattaaaatccgtaagaccgcgatttgcggtaccgacgtgcacatctataactgggacgaatggtcgcagaaaaccattccggttccgatggtggtggggcatgagtacgttggcgaagtcgtgggtatcggtcaggaagttcgcggctttaagcttggcgatcgcgtttccggcgaagggcatatcacctgcggacattgccgcaactgccgtggcggtcgtacccatctgtgccgtaataccatcggcgtgggggtaaaccgcccgggctgtttcgctgaatatctggtgatcccggccttcaacgctttcaaaatcccggataatatctccgacgacctggcatccatcttcgacccgttcggcaacgctgtgcataccgcgctttccttcgacctggtcggtgaagatgttctggtttccggcgctggcccgatcggcgtgatggccgcggcggtggcgaaacatgtcggtgcgcgtaacgtggtgattaccgatgttaacgaatatcgtctggagctggcgcgtaaaatgggcgtcacccgcgcggttaacgtcgctaaagagaatcttaacgacgtgatggccgagctggggatgaccgaaggcttcgacgtgggtctggagatgtccggcgcgccgccggcgtttcgtaccatgctcgataccatgaaccacggtggacgtattgcgatgctgggtattcctccgtcggatatgtctatcgactggaccaaggtcatcttcaagggactgtttatcaaagggatttacggccgcgaaatgtttgaaacctggtataagatggcggcgctgatccagtctggcctcgatctttcgccgattatcacccatcgtttcggtattgatgacttccagaaaggctttgacgcgatgcgctccggccagtctggcaaagtggtactgagctgggattaagcgaattttcgtcaggatgacgataataagcattcttgctgcccatgaatcatgggcagcttatccttttcatatatatcgataataaagttattgttattactacggtcactattgaactggtgtcgggtttatttatattctgccatatcttcatataacaaggatgagatatatggcacaccctatttttatcagccgtctttggcaattgaagaatattatcttgccggtactactgctaatggtaagttttggcattcaggctgagcgcaggcttgagcatggcgtactgcaagcctactggaaggcgcaatggagcgataacgcgaccattaatgttcctgccctcggatttcgctattattggctggatgaccaggggaaattaaaaaaagtcatcaatatatatgttaagggaacgctgaaagaacagttgctgtttattcggcagaactttagtgatatcccggaaaattttatcaaatttcgcgagtggtacgttaaccagcagggtagtctgctggttaataatatcgcgcagtataccgaatgcagcagtgagaattatagcgccgtattgctttcttttgttcctgtgcaaaataaacctgcatcaaatatagacgatatgaatgctcaggtctcctgcggcggggacgggcgctatccctggttaacgacatatcatttacagcatgaatggaatcagctttcattcaaagaatggccagatgataatgcgaataatacatattccgttatggctgatgacgtggtggtgaaaatacgcactattaacaaatactggatctatgccgctctttacgatgacagcaaagcggaccgtatgagtgacaaacgggggtacataaggagagggcatctcaaaccagataactgacacccggtggtatcgggcaatgtgatgaaatttatctcaaggtagatttatttagatttggataacatttctaaaataatacgtatctatcgcactatttctgcatcgattttttacctattcgtttatacagttagtttactcttcgtttaatcgcataaacactatgtttaaactctcagtatgcttgctgacctgtaattcggcccgcttattacgggaagtattgccgccgttgttgcgggtggcagatgagtttattgtcgttgattccggcagtatggatgaaacgctacagatatgtcagcagtttggcttaacggttcaccatcacccctatgccgcccacggcatgcagatgaactatgcgacctcgctggcgactcatgactgggtgctgtgcatggatagcgacgaaatcctcgatgatgaagtggttgcggcgattcttgcgcttaaggcgggagaggagccggatccgacctgcgcgtggcgcctgccgcgctactggttcgtgcttggcgaacaggtgcggaccatctatcccatctcatcgccggattacccggtacgtctgttcaaccgtcagcgggccagttttaaccagcgtccggtagacgatcaggtagtcggccatctgacctcgaccaggctgccgggctttgtccgccacgataccttctattcactgcatgaagtgtttaacaagctcaacagctataccacccggctggtgaagatgcagaaggtcaggccgtcgctcagccgcgggattatcagcgccatcggtgcgttttttaagtggtatttattcagcggcgcctggcgtagcggcaaggtgggggccgtaaccggtttgtacgccaccttgtacagcttcatgaagtattttaaagcctggtatgcctacaatggtaagcagcagggaaccgtgacggagaagcgcacggatccctgatgaagattagttggtggggctgtcccagccctgccatttcaactggtaatactggaccagcgcgctctggctgatgctttcgctgaggatgctaaagaagcggctggcgttcaccggctccagcggacgcttcggtttgcagtacttcacgccatggaacgggttacgcggcttctgctgttgcggcgcgtttggttggacgggcgtgttcggcgtcgagttgtcgacctgcggttcgttcagcaggctgctcgggcgcaccagcgtgatatccggcggcaggttatagaccatttgctgtagtacccgcaccgttgaagggtgtgggtgaccaatggcgattgccgaaccattacgccgcgccagcgcgatggcgcgattgaactgagtgcggatatccgcctcgttctgggtgtcgtcgagaaacactttgcgtttaatcaccttcacgccggtaccttgggcggcgcgcatggcctgggtgttgccgatggtcacgctatcgagaaaatagagattgtagcgttccagagcctgcatcaccttctgcatgccgaacaggttagaggtcatggcgctacccatgtggttgttcagcccgacggcgtaaggcactttcccgtaagcctcacggataatacgttcgatctcatcgctgctcatatccgggcgcagcgtgtctttttccagcggttgcttgctgagcggcgccatcggcagatggatcagcacttcatggcccagattatgcgctttagtggccatttcccgggcgtggggggcattcggtagtacggcgacggagatggtaggcggcagcgccagtaccttattttccgtctgcggacggtagccgaaatcatcgataacgatggagagtttaccggcaaaaaccggcgcagctatagccagtgaaccggctacagcaagtgcaatcatgcgaaattgaagcaaaacttatcttcccaaccacggctgtggattgaccgcctgaccctggcggcgaatttcgaaatagagcgacggacgaccctgaccgccgctactgcctaccagcgcgatagcctggcccgcgcggacctgggtaccgacgctgaccagcgcgctttggttatagccgtaaagactcatgtcgcctttgccgtgttcaacgaccaccaccaggccgtagccctgtagccagtcggcgaggatcacccggccatcggcaatggctttgacttcggtgccttcagacgcagcgataaccatccctttccaacgtagttcaccttgcagctgttcgccataacgatgaagaattgttccgcgtaccggccagaaggcctgcccgcgcggcgcgccgaggccgccggttcgcgacatcagcgaacgttcgctttcggttggtttataggtggtgcctttgcgcgaggcctcctgctggcggtcacgtaccgcctgggcatcacgagcctcgcggtcggcgcgggctttggctgccgcttccgcctgggcgatgcggccgcgcaggcgcgattcgttagcgcgcagttcgctgagctgctgttggcctttctgaatggaggattcgaggctggagagcgtctttttacgctcgttgcgcgcctgctcaagcttggcctgctgcgctttttgctcgtaaaccagcgtttgctgctggctttgtttttcttccagcatcgatttctgcaccgcgacttcttcgcgcgtctgcttgagctgggcgatggtttcctgacgggcctggttaaagtaaccaaaataggcctgcaggcgctggttacgctgcccctcttcaccgctgaggatcatctgcatgccggtgtgcggcccctggcggaacgcggcgtcaagctgcgcggcgagattccgttcctgggaggcgcgctggcgctccagcttagcgatagacgcgttcatgtcgtcaatctgcttattgagctgattgagagtatcctgagtttcacgcagtttgcgcgcggcggcggaaatggcctcttcctgcgcttttaactgggcgagcagggaggcgcgttgctgctgctgttgcttaatcgcgcgctgtttggcggcgatatcggcctgaatggatttcaactggtcgcggtcatcggcgtgagcggatgcggcgcacagcaatacgccagcgctaagcgcgctggcgtaaagaacggatcgaacagccgttgcgatccatgtatttgaataagtcgcctttcccctcatggggaaggattattccacgatgaacagcggcttgccagtcatctcttgcgggatttccattcccatcagcgacagcatggttggcgcgatgtcggaaagcttgccgccttcggccactttcaccgttttgtcgccaacgtagatcagcggaaccggcaggttagtatgcgcggtgtgcgcctgtccggtcgccggatcgcgcatctgttcggcgttgccgtggtcggcggtgatcagcagctggccgccgacggattcaacggccgcggccacttgctcaatgcagtgatccagcgcttcaaccgctttcacggcggcttccatcaccccggtatggcctaccatatcgccgttcgggtagttgcagatgatggtgtcatactgaccgcctttgatggccgcaaccagtttctcggtcagctcggcggagctcatttccggctgcaggtcgtaagtggcgaccttcggcgagttaatcagaatacggtcttcgcctttgaacggattttctaccccgccgttaaagaagaaggtcacgtgcgcatatttctcggtttcggagatgcgcagctgggttttgtcgtgcttcgccatccactcgccgaaagtgttcgccagtgaagctggtggataagcgcaagcgactttgatgtcggcggcgtattcggtcagcatcacgaaatcgaggttaaccactttcttacgcgcgaagccgtcgaagtcggcgttaacgaaggcgcgggtgatttcgcgcgcgcggtcagcgcggaagttcatgaagatcagcgcgtcgccgtcttccattgcggcatcggcctggccggcggcgcggataacggtcgctttgacgaactcgtcgttttcgtcacgcgcgtaggctgcctgcaggcccgccacggcggtgtcggcctggaattcgcctttggccagtgtcatcaggtcataggcttgctctacgcgatcccagcggttgtcgcggtccatggcgtagtagcggccaatgatagaggcgatacggcctttgcccagcgcggtgaatttagcttcgaatttagccagcgtggcttcagcgctgcgcggcggcgtgtcgcggccatcgaggaaagcgtgcagatagattttctctgcgccgcgttccgcggccagttctaccatcgccatgatgtggtcttcgtggctgtgaacgccgccaggcgacatcaggcccatgatgtgtaccgctttaccggcggcgacggctttgtcgaccgcgccggtcagcaccgggttggcaaagaaggtgcgttctttgatttcaacgtccagacgggtcagatcctgatacacgatacggcccgcgccgaggttaacgtggcccacttcggagttacccatctggcggtcaggcaggccgacttccagaccggatgcatcaatcagggtgtgcgggcgttttgcccacagtgcgtccattaccggcgttttcgcgctataaatggcgttatcctgctggtcttcacggtagccgtagccatccagaatcaccagtaccataggttttttagtaaccgacattgcgacaacctcatgctcaaagacagaaaatttgcgtaattttactacagctgaatcgatcaaatcaccgtaaaagatcaaagaaagggaaggggtgacgccacagtcgatggcgaagtcggtttttttttcgtgacgggccgcagaaaatacattacatcgcgctcactggctgtatttgccgcaatgcacaggtatactccttccctggtttttttatcacttagtcgggagttgtaaccccccatgcaagaaattatgcaattcatcggccgtcacccggtcctgagcatcgcgtggatcgcgctgctgggtgcggtactgttcaccacctttaaaggcttgatgtcaaaagttaaagtcattactcgtggtgaagcgacgcgtcttatcaacaaagaagaagccgttgttgtcgacctgcgtcagcgtgacgacttccgtaaaggccatatcgccggcgctatcaatctgctgcctgccgatatcaaagcaaataacgtcggcgagttggaaaaacacaaagcacaacccattattgttgtggatgggtccggcatgcaggcgcaagaacctgccagcctgctgaataaagccggattcgaaaaagtctttgtactgaaagaaggcatcgcaggctggagcggcgagaaccttccgctggtacgcggcaaataatttacccccgcgtcgttatggcgcagcggttcccccgataacctctcaggcggcggggagcctctgcggcgtaaaatccctcggggtaaaaacaggagtgagtcatggccaatattgagatctataccaaagcgacctgcccgttttgcatccgcgctaaagcgctgctgaacagcaagggcgtgacgttcaacgaactgcctatcgatggcgatgccgcaaagcgtgaagagatgatccagcgcagcggccggacgacggttccgcagatttttattgatgcgcagcacattggcggctgtgacgacttgtatgcgcttgattcacgtggtggacttgatcccctcttgcgctaatttttacgctttccccatccaggggcgcgtatttaaggacaacacgaaagggttttactatgtcagaacaaaacagcaccgaaatgactttccagattcagcgcatctacaccaaagacgtttccttcgaagcgccaaatgcgccgcaagttttccagaaagattggcagccggaagttaaacttgatctggataccgcttccagccaactggctgaaggcgtttatgaagtggtgctgcgtgtcaccgtaacggcatcgctgggcgaagaaaccgcattcctgtgcgaagtacagcagggcggtatcttctccatcgacggcatcgatggcaaccagatggcgcactgcctcggcgcgtactgcccgaacattctgttcccgtacgctcgcgagaccgttaccagcctggtttcccgcggcaccttcccgcaactgaaccttgcgccggtgaactttgacgcgctgtttatgaactatctgcaacagcaggctggcgaaggtgctgaacaacatcaggatgcctgatgaacgcgcttaatgctgcaatgactgtgatcggtgccggctcttacggcaccgctcttgccatcaccctggcaagaaatggccacgaggttgtcctctggggtcatgacccgaaacatatcgcgacgctgcaacacgatcgctgcaacgccgcgttccttcccgatgtgcccttcccggacacgctgcgccttgagagcgatttagcgacggcgctggccgccagccgcgatatcctcgtggtggtgccgagccacgtcttcggccaggttctgcgccagattaaaccgctgatgcgttccgatgcgcgtctggtgtgggcgacgaaaggtctggaggccgaaaccggccgtctgctgcaggacgtggcgcgtgaagcgctgggcgatgacatcccattagcggtcatctccggtccgactttcgccaaagagctggccgccggcctaccgacggcgatttcgctggcggcgacggatccgcagtttgcagaagaccttcagcgcttgctgcactgcggtaaaagcttccgcgtctacatcaacccggattttatcggcgtgcagttgggcggcgcggtgaaaaacgttatcgccatcggcgccgggatgtctgacggcatcggctttggcgcgaatgcgcgtacggcgttgatcacccgtgggctggtggaaatgtcccgtctcggcgcggcgctaggcgccgatccggaaaccttcatgggcatggccgggttgggcgacctggtactgacttgtaccgataaccaatcgcgaaaccgccgttttggcatgatgctcggacagggcatggacgtgcaaagcgcgcaggacaagattggccaggtggttgaaggctatcgcaataccaaagaggttcgcgttctggcgcagcgtttaggcgtcgaaatgccaataaccgaggaaatttatcaggtattgtattgcggaaaaattgcgcgcgaggcagcattgaccttattgggtcgcgcacgcaaggacgaacgcagcgccaactagccgcagggaaagtctgttacctgtatgacccggtcagcgaagaactgaccggtcataattcttatcgtctggagtatgcaatgccgtgtgaagaactggatatcgtctggaacaatattaaagccgaagcccgggctttggccgactgtgagccgatgctcgccagtttttaccacgcaacgctactcaagcacgaaaatctgggcagcgccctgagctatatgctggcgaataagctggcctcgccgattatgcctgctatcgctattcgcgaagtggtggaagaggcctatgccgctgacccggagatgatcgcttccgccgcctgtgatatccaggcggtacgtacccgtgaccctgcggtcgataaatactcaacgccgctgttgtacctgaaaggcttccatgcgctgcaggcctatcgtatcggccactggctgtggaatcagggtcgccgcgcgctggctattttcctgcagaaccaggtttccgtctcgttccaggtcgatattcatccggcggcgaagattggccgtgggatcatgctcgaccacgccaccggtatcgtggtcggtgaaacggcggtgattgaagacgacgtatccatcctgcagtctgtgaccctcggcggtaccggtaaaaccagcggcgaccgtcacccgaaaattcgcgaaggcgtgatgattggcgccggggcgaagatcctcggcaatatcgaagtcgggcgcggggcgaagattggcgccggttccgtggtgctacaacctgtgccgccgcataccaccgccgcaggcgtaccggcgcgcatcgtcggcaagccggagagcgacaagccagcgatggatatggatcagcattttaatgggattcaccatactttcgagtacggcgacgggatttgatgtattgccatttgccgccgcgaagctcaaaaatgtagatatcagctatcactttgcaactgtttcgctcctggataaacggttgttctgtgctgtttccgagcacattgcgctcccgatatttcttctgcgttatgtctttcatggcgcagggagcgcacagagggcggccagtcgctgccgccctctgtactcccgggctctggccgccaaaatcgccacttcgtggtaccttcgacttatcccggcaggcttcgggtcgggccgaggcagcgtccgtgcaaaacacggccctcagcccgcatccatgcgggctgccccggccttccgggaacgtctcagcgattttgaggccaccaacaccggcagtttcaggcagtattgatgcggttgtagcgcgagtagcccggataaggcgcagcgcgccacaatccgggacccactcaggttagctgcgcaacacggcgccagggtatcccaactggcgccaggcttcatacaccaccaccgacaccgcgtttgacaggttcatgctgcggctgtccggcatcatcggaatacggattttttgctccgccggtagggcatcgaggatgctggccggcaggccgcgcgtttccggaccaaacatcaagaaatcaccatcctgatagcttaccgcgctgtgggcgggcgtgcctttagtcgtgagggcgaacaaccgttgcggcttcgcgctggcgacaaacgccgcgtaatccgcgtggcgctgtacggcggtgaactcgtgataatccaacccggcgcgtctcaggcgtttatcgtcccaggtaaagcccatcggctcaatgatatgtaaattgaagccggtgttggcgcacaggcggatgatattgccggtgttcggcgggatttctggttcgaataacacgatgttcagcatactgcccccttaattgcggggggcagaatagcagatatttgttgaaccctcaccccgaccctctcccagagggagaaggagaaaaccgattccagccggacgggcccctcaccctgagggagaggggcggcgtaagggaaaacgcggggaattacgcggcattgccctgcttgagcgcatcgaaggtctgcagcgcttcggcattctgcaccagcgaatcgcggctgatttcgctgatggatttcgccccggtcagcgtcatcgccactttcatctctttctcgataagattgagcagattcgccactccctgcttgccgtgggtcgccagcgcgtacagatacgcgcggcccagcagcacgctgtcggcgcccagggcgatcatccgcaccacgtcgagaccgttgcggataccgctgtcggcgagaatagtgatgtcgcctttaaccgcatcggcaatggcgggcagggcgcgggcggaagagagcacgccgtcaagctggcggccgccgtggttggagacgacaatgccgtcagcgccgaagcgcaccgcatcgcgggcgtcctccgggtcgaggatccctttgatcaccattgggccgtcccagaagtcgcggatccactccaggtctttccatgaaatcgacggatcgaaattattcgccagccagccgatgtaatcctcaagcccggtcggtttgccgaggtaggcggagatattgcccaggtcgtgcgggcggccgttgagaccgacgtcccatgcccactgcggatgagtgacggcctgccagtagcggcgcatggcggcgtttgggccgctcatgccagaatgggcgtcgcgatagcgcgcgccgggggtcggcatatccacggtaaagaccagcgtggagcagcctgcggctttggcgcgctccagcgcattgcgcataaatccgcgatcgcgcaggacatacagctggaaccacatcgggcgtttgatggtcggggcgacctcttcaatcgggcaaacggaaacggtagagagggtaaacgggatgcctttgtcgtccgccgcgcccgctgcctgcacttcgccgcggcgcgcgtacatgccgcacagcccgaccggcgccagcgccgttggcatcgccagcttttcgttgaataacgtggtctccaggctcagatccgacatattgcgcagaatgcgctggcgtagcgccacgtcggagaggtcttcaacgttgcggcgcagggtatgttcggcgtaggcgccgccgtcgatatagtggaacagaaatggtggcaggatacgctgtgcggcggcgcgatagtcgctggcggcggaaataatcatcacgagttctccctggaattttcattgtggtcaccgggcaggcgggtaatacgcgcctggcgggcctggtcttcatcaaaacgtttaatggtggcgtggacaaaaccgaggtgggccatcatcgcctggcgggcgccttccgcgtcgccggcgaagatcgcttccattaccgcctgatgttgttcggtcagacgcgcgaacaccggcggcaccagatacatgcgctggcggctctgcttcaccgaggattgcagaagctcgaagaaaccgcgcatggtttgcagcagcaccacattatgtgaggcttcagcgatcgccaggtggaagcgaacatccgcctgtgaggcgagatccgggtcatcgctgagggtggcttcaaaacagaggcggattttttctttttcggcgtcggtggcccgcatcgccgcatgccaggcggtgctggcttcaatagcgtggcgggcttcgagaatatcaaaactgtagtcggggtcgtcggcgagcagcgttttcagcggctggacgatgttttgctccgaccagggctcgtgctgccagcgcacgaaggtgccgccgccgcgacggctaagcagcaccccttcgttgaccagcatcgccagcgcttcacgcagcgaattgcgtgaaacaccgagctggacggcaagctggcgctcggcgggcaaacgcatgcccgcctccagctgttgttcttctatcagcgcccggacgcgatttgcgacgtcgtcagccaggcgttttggcatcactttcacggaatcatccaggttaagacataagcctgcagggtggtaatcaggcccaccatgcaggtgaatatcaggctgtgcttgacggtaaagcggaacaggtccgactctttacccaccaggcctaccgcggcgcaggcaatggcgattgactggggcgaaatcatcttgcctgtcaccccaccggtggtattcgcggcgaccagcagaatatcggagacgccgatttgctgggctgccgtcgcctgcagcgcggcgaatagcgcgttagacgaagtatccgaaccggtcaggaagacccccagccagccgaggaacggcgagaagaaggtaaacgcgtggccggtatgcgccagcgccaacgccagcgtcgatgacagcccggagtagttcgagataaaggcgaacgccagcaccatgccgatggagtaaatcggcagcgccagctctttcaacgtcccggcgaaagtggtcagcgcatccttcggcttcatacgcagccagacgatagacagtatagcggcgaacagaatggcggtgccggttgccgacagccagtcgaatttatataccgcggcgtacggcgtcgcggcgctcaccaccggcggcatacgggcgaccattttgtcgaggaacggtaccgggatgttaaccacgaagtcatacatcgccccgcccggcgcaaacagcgctttaaacggcggcacgctccacagggtgacggtagcggtgaggaacaggaacggcgaccaggcgcgaatgacctgaccggcggtgtaatgcgtgcgcgccagggtttgatcaacctgcgcggcgcccatatcgccaaagcggaagatacgtaccggctgccagcgcttgaggaacagcgtcaggcataccagcgacaccagcgaagagatgatgtccggcagttccgggccgaggaagttagagctgaggtactgcgcgatagcgaacgagccgcctgcgaccatcaccgcaggccacgtctctttcaccccgcgccagccgtccataatcgccatgatccagaacagcacgataatggtcaggaacggcagctgacggccaaccatctggccgatggcgaagctatcgatgccggtcacctggccggcgaccagaatcgggatccccatggcgccgaaggccaccggcgcggtgtttacaatcaggcacagtccggcggcgtatagcggattgaagccgagcccgaccagcagcgcggcggtgatcgccaccggcgcgccgaaaccggcggccccttcgaggaaggcgccgaaggagaagccgacaatcagcatctgcaggcgctggtccggtgtaatcgaaagaatcgacgagcggataatgtcgaactgcccggtcttcaccgagattttatagacgaagaccgcggcgatgataatccacgcgataggccacaggccgtagaagaagccgtataccaccgacgataaggcgcgatcgaccggcattttatagaacagcagggcgacaagcagcgcgatggctacggtccaggtggcggcgatatagcctttaagcttgagcttaatcagggcgaaaaagaaaaacagaatcggcagtgaggcgataaggctcgatagccagatattaccagccggatcgtaattttgttgccagaggttcatgcaggtctccatcgggccacatccaatgcatcaggttgggtctgcgcccattgccgatcacactatttgtaaaattggcccagccaaattgcgattgtagggttaacgacaattgatggttaaccaaatgttatggcatggcaacgcgtttgtgatgcaaattgatggatatgtgaaccgattgacggtttaagaaataattggttgggccaatttggcggggaaggggaaattggctgtgagttcacggcccggtagggctaccgggtaaaagacgacaaactcacagcggcaaaagattaaaactcgctcttcgcgaagccggtcatctctttaaggcccatttcacggcccagcgcggtcatcggatggacgacaaccagtccgcgcacgcttttcttcagcttgcccatatcggcctgctcttttttggtgatggcgcgacggtgcggcatgctcatcagtttctgcgcttctttgctcagcttctgcgactgaacggaacgcaggcgttcgatttccgtttccagggtcgccttttctttttccagctccgcgtatttatcggcggcttcgaccagcgacaggtcggcctgctggtggcggatggcgtcgagacggtcgctcaaacgcttgatttcattcttttcgacttctttcatggtaattttatctgtgaataaaggggcttcgacgttacatagtatgggccgggcgggcctttgttgatagttttttatcgaaatactcgtggcttcaccgccgtaagcatgagacctgatacattataactatctgaatagtagcgatattgtaattttaattaagctgtttatcatttttgtgaagcctgacgaccattcagcacgttttcctcaacttgctccctttttttcgccaatccttaataagatccccctgaacagaggagagcgtgatggcgaaaatcggcgacggcgtaccacgtatcatcgataaaacggtagatttcatggcctcgagccaggcgtttatggaatatctgaaaaaatgcccgcgtttacagcggataccgcgcgatattcctgaggataaaaaagcgctatttctgagtcgtctggagtattaccggcagctgtaccggccgacgtgcgaccagcaagaagcggagtcagagcgttgatttctggaaggctttttttaagctgattcgggaaatcagctcagtcagagacaacaccatcgtagaacgtaccatctgctggtagcgcagtttctgcattgccagcagttccttatcgctctcatcaaacagcggcgttggcggaagcgcggcgacgcagtgcagctcgcctaacggcccgagaatttcatcgtcggtgaaagcgtactcattgccgtcatgattgagctcttcacgcaaggccatcaatagctcggcatcttcgtattcggcgcggcttatcaccccaaggccgtagataagcttcaggcgtacggaaagatcgcccagcggcccactgccgtccagcaatggctccactgcgtatttcaccgcgtaatcgtctttgcggaatacctgaagcaccagaatattgaccgcctccgtcaggagttcgacggcggctatcaggaaacttcttacggtcttaccagcatttaaacgctcaagtacgcggttttcaaatgcctgtgtttcttccattattgcctgcatatctgacaggagtggtattgggcgcggcatcggccgcgccaggttgtacatcattttaccgcgttgtagtcgttaacggcttccgccactacagcgcttgccgcatccagaccggaaatctgcgccagcgcggcctgtggccctttttcggcaatcagcgccgccagttcctgagcctgcggatcgtcttcgctgcggaaatgcatggccgcggcaatcccttttaccaggttccggtgcggcaggccgtattccagcgtgccaagcagcggcttgatcaaacgatcgcccgcgctcaatttacgcagcggctggcggccgacgcgctccacatcatctttcagatacgggttctcaaagcgaccgaggatcttctggatataagccgcgtgtttctgcgcatcaaagctgtagcgtttaatcagcaccgcgccgctctcttccattgcgcctttcacgacggcgcgaatgtgctcatcgagaatcgcgtcgcgaatcgtttgatggcccgccagtttcccgaggtaggcggttatagcatgcccggtgtttaaggtgaatagcttacgctcgacaaatgccatcaggttatcggttaattccattcctgggatgttcggcagctcgcccttaaactgggttttatccacaatccattcgctgaaggtttcaacggtgacttccagcggatcgtgggtggcggaagccgacggcggcacgatgcggtctacggcggagtcgacgaaaccgatatgcgcttcaacccacgctttgtcctcttccgccagcgcgttaaacacatggcctttcagctggctggtgccgcgtaccatgttttcgcaggcgatgatattcagcgggcgttcaataccctgcgctttacgtttcaccaggcctttggcgatggcaggggcgatacgctccagaacgacggggccgaccgcggtggtcaccaggtcgacatcggcgatcagatccaccacctcatcgccaatgctgctgacggcattcacgccggagacggtatcaacctgttcgttttcacccaccacgtggacctgatagctatgacgggcattcagggcatcaaggaccacctgattaacatcggcgaacgtaagggtgataccggcgtcagccagcagtttgccaatgaagccacgtccgatattacctgcgccaaaatgtaatgctttcatagtattaaccttcaattaatgtttttacctgagagggctggggtgaggcttttccctcaccccaaccctctcccaaagggagagggtatggagcgttgtggttatttattcagcaacgacaggacttcttcgacgctggtggttttcgccagccgctcaatcacggtttcatcatccagtgcgttggtcaggctggtgataacgtgaatgtgttcgttgttgcgggcggcgataccgatgaccagacgcgcgacttcatcttcttcttcgccgaagcgcacgccttccggatactggcagaagacgacgccggttttcagtacccggtctttcgcttcaatggtaccgtgcggtaccgcgatggattcgccaagataggttgaggtcagcttctcgcggtcgagcatcgcctgcacgtattccggctcaacgtatccgcctttcaccaattgttcaccggcgaagcgaatggcctcttctttggtcgccgctttgcgcccgaggaagatgttatccgcacccagctggaacaggtttttgtcagtattatcaaagctatctttcaggctatcggtgactttcacttcgttgtcgatgtggcgctgcgccgctaccagacgctcggtcaggctggtatacagaccgctgtcgaggaagttggtcagcgaaatatgctgtgcctgcggtacctggcgcatggcgcgctcggtcaggtcgcggtgggtgatcaccaggtcgacatccggcggcaggttgttaatcgcgctgttagtgacagagatattgctcagtccggcatcctggactttcttacgcagtaccccggcgcccatggcgctggaacccataccggcgtcgcaggcaacgatgattttacgcacgtggctaaggtcgttagccacgtcgcccgccgccaacggcgtcgccgcgcctttggactcggctttcatgtcgtgcatgcgacgggttgcggcttcgatatcgtcttcttctttcactttgctggttttcagcaggatggcggagacaataaaggagaccgccatcgccgcaataatggccgcgatgttagcgaagtaggcgccttttggcgtcatcgccagtaccgccagaatggaacccggggaagccggggagaccaggccgccgttgaggatagtcagggtgaagacaccggtcataccgccgaggataacggccagaatcagacgcgggttcatcagcacgtacgggaagtaaatttcgtggataccgcccaggaagtggatgattgccgcaccgcccgcagactgcttcgcgctgccgcggccaaagaacatgtacgccagcagaacgcccatccccggacccgggttagcttcaatcaggaagaagatggatttgccaagctcatgggactgctgaatacccagcggcgagaagataccgtggttaatcgcgttattgaggaacaggattttcgccggttcaacaaagatagacgccagcggcagcatgtcgtgcgccaccatgaagttaacgccagccgccagcagttttgacagcacttcaaccgccgggccgatgccgaggaacgccagaatggcaaggatcatcccgatgatgccggcggagaagttattcaccagcatttcgaaaccggatttgatcttaccgtctacccaggcgtcaaatttcttaatgcagtagccaccgagcgggccggcgatcattgagccgaggaacatcggcatatccgcgccgacgataacgcccatggtggtgatagcgccgacgacgccgccgcgctcaccgccaaccagcttaccgccggtataaccgatcagtagcggcagcaggtaggtgatcatcgggccgaccagcttcgccagcgtctcgttcggcaaccaccctgttgggataaataacgcggtgataatcccccacgcgataaacgcgccgatattcggcatcaccatattgctgaggaaacgaccaaagctttgcaccttgatcttgatatcggatgacataaaacaccccttcttctgttttgcttatcgcgcaggctgaacgcccgaggtttgttgttaatgtggcggcagaggtagccggaccctgattgatagtgcgaaatctggcactgaatcgttaagctgtccagcgagcggctttttatgtgattttggtcacataaatataggtgtctggtacttatatgtagtgatcgccatcacaaaaatgatgtgtaaaaaaacaacaacaggcgatggaagcccatgaatcgcatatttatgtgatattcgtcacattataactttgcgattttgttatttgtttgtgatgaacatcacaaaatattttgcactcaattccgccaggtgtgatctgccgcaggttctgctttccccagcggccaacgatgtaactttgcaacccgcctgcgcgaagaacattttttgccgctgatggcggaaatgaaaacggtgaattatgctcaaattgtcagccagccgccgcttcgtcggcgctcacaattccaataatctattagcgtgaatcgaggaaattatgtttctcaattattttgcgctgggcgttctaatcttcgttttcctggttattttttacgggattattattttgcacgatattccgtacctgatcgcgaagaaacgtaatcatccgcactccgatgcgattcacgtcgcggggtgggtcagcctgtttacgctgcacgtaatatggccatttttatggatctgggccactctctatcagccggcgcgcggctggggaatgcagcataagccgaatgaagcagggactgatggcgctgacagcgagctggcgcaactcaatcagcgtatcgctgaactcgaacataaaatcgcgcatctgcagccgacagcgccgccatcctcaacggagaaataatcatggacctgttgatcattttgacgtacgtggccattgcgtggtcggtatttaaaatattccgtattccggtaaataaatggacggtcccgaccgcggccctgggcggcgtatttattgttagcgcgcttattttattaatgaactataaccacccttatacttttacggcgcagaaagcggttatttccattcctattacgccgcaggttaccggcattgttagcagcgtgaccgataaagccaaccagcgggtgaaaaagggcgaggtactatttactatcgacccggcgcgctaccaggcgcgtgtcgacaggctgcaggccgatctggtcaccgcattgcatagtatcaataccctgaaagcccaactgcaggaagcgcaggcgaacaccgtgcgcgtctccgccgagcgcgaccggctgtataaagattatcagcgctatttgaaaggcagccaggcgcgggtcaacccgttttcggaaagcgatatcgataatgcccggcaaaactaccttgcccaggatgcgttggtgaaagcctcggtcgccgagcaggcgcagattcagagccagctggatagcacgctgaatggcgaacagtcgcaggtggtgagcctgcgcgcgcagttggcggaagcgaaatataacctcgatcagaccaccgtccgggcgccgagcgatggctacattacccaggtgctgattcgcccgggaacctacgccgcgtcgctgccgctgcgcccggtgatggtctttattccgcaacagaaacggctaattgtcgcccagttccgccagaactcgttgctcaggctggaggccggcgatgatgccgaagcggtgtttaacgccctgccaggccaggtattccacggtaaactggtcaacgtattgccggtggtgccgggcgggacttatcaggcgcagggttcgctgcagtcgctgagcgtcacgccgggtagcgatggcgtgctggcgacaattgaactggatcccgatgcgcaggtcgatgcgctgcccgacggcatctacgcccaggtggcggtctattccgaccatttcacacacgtgtcggtgatgagaaaagtgctgctgcgcatgaccagttggatgcactacctctatctcgatcattaatgcgatcggcggcaggttgagacaacgtcgcgcctgccatttgcctgcgcctgaaccatactgatcttttcgttggcgaaaggagcaggcaatgaaactgatcggcagctataccagtccttttgtacgcaaaatttccgttatcttgctggaaaaggcgatccccttcgagtttgtgaacgaattcccctataacgacgtcaacggcgtggcgcagtacaacccgctgggaaaagtcccggcgttgctgaccgatgacggcgcgtgctggtttgattcacccattattgcgcaatatctggaactgctaaacgtcgcgccggcgatgctgcccgcggaacctctggcggcgctgaagatgcgccaactggaagccttgtctgacggcatcatggaggcggcgatcgcactggtgcgggaaaaagcgcgtccggcggcccagcagtcagaaaccgaactgctccgccagcgggaaaaaatcgctcgcggccttgatatgttggaagggtacgccgccgacggtaccttgcgtcacggtgagctgaatctggcgaccattactgccgcctgcgctattgcttatctgaatttccgtcgcgtggcgcccggctggtgcgcgacgcggccaaaactggtcaaactggtcgagacgttgtttcagcgatccagttttgcccgtaccgaaccgccagggagttgacccaggcaggtaacagtttcctcgcgcaggcgttacaatcgccactcattgttgactccctctcccgtcgggaggggggaaaataacttatcgtcaggttcactcatgtctaccgatactcgcgcgctttatacccggcttccggccattgaccgtttacttcgcgatcccgcttttgctttactgctcgatcgccatggccattcgcaaatcgtggcgcttctgcgccagatgttggatgaggcgcgggaacatatccgccaggcgcaggcattgccagagtggtgcgacgactggccgcaggagaccgccagccggctgaaccatagtcagcagagcgcgctgcgtccggtattcaacctcacgggcaccgtgctgcataccaatctggggcgcgctatccaggcggaagccgcggttcaggcggtggctgtggcgatgcgcgcgccggtcacgctggaatacgatctcgacgatgccgggcgcggtcatcgcgaccgggcgctggccgatctgctgtgccggatcaccggcgcggaagatgcctgtatcgtcaataacaacgcggcggcggtgctgctgatgctggcggcgatggccagcgggaaagaagtggtagtctcgcgcggcgaactggtcgagatcggcggcgcatttcgcatccccgacgtcatgcgccaggccggttgtttgctgcatgaagtgggcaccactaaccgcacccacgccaaagattattgtcaggctatcaatgagcagactgcgctgctgatgaaagtgcataccagcaactacagcattgaaggctttaccaaagcgattgatgaagcggaactggcggaaattggccgcgaacatggcgtgccggtggtggccgatctcggcagcggctcgctggtggatttgagccagtacggtttgccgaaagaaccgatgccgcaggaattgattgcggcgggcgtgaacctggtgagcttttccggcgataagctgctcggtggaccgcaggcggggattatcgtcggcgatcgggcgctgatcgctaagttacagagtcatccgcttaagcgtgcgctgcgggcggataaaatgacgttggcggcgctggaggcgactctgcgcctgtatctgcatccggaggcgctggccgacgagctgccgacactacgcctgctaacccgccgcgccgaagatattcgtcagcagggcgagcgcattcagcctgggctggcggcgcactatagcgattttgacgtgcgcgtcgaagcgtgtttatcgcaaatcggcagcggttcgttgccggtcgaccgactgcccagcgccgcgttaacctttacgccgcgcgatggtcgcggcagccagctggaagcgctggccgcccgctggcgcgccttgccgataccgacgatcggcagaatttatgatggccgcttatggctggatctgcgctgtcttgaagatgaaccccggtttatggagatgttattgagatgattattgccaccgccggacatgtggaccacggcaaaaccacgctgctgcaggcgattaccggcgtcaacgccgatcgtctgccggaagagaaatcacgcggtatgactatcgatctcggctacgcctattggccgcagcctgatggccgggtgttgggttttatcgatgtgccggggcatgaaaagtttttgtccaacatgttggccggcgtgggcgggatcgatcacgcgctgctggtggtggcctgcgatgacggcgtgatggcgcaaacccgcgagcacctggcaattctgcagttaacgggaaaaccgacgttaaccgttgcgttgaccaaaacggaccgcgtggacgcggcgcgggttgccgaagtccgggcacaggtggaatccacgctgagcgagctggggttcgacgacgtggctttcttcgccaccgcggcgacggaaaacctcggcattaccgaactgcgcagccatttgctccagctgaccgagcgcgcgcatccgcaacagcagcgttttcgtctggcgctggatcgcgcctttaccgttaagggcgcggggctggtggtgaccgggacggcgttatccggcgaggtaaaaatcggcgataccctctggctgaccggggccaataaaccgatgcgtgtccgcgggctgcatgcgcagaatcagccggttgaacaggcgcaggccgggcagcgtatcgcgctgaacatcgttggcgacgcgcaaaaagaggatctcagccgcggcgactggctactctcggcgcagcccgcagaaccttgcgagcgggcgatcgtcgaactcatctgtcacgcgccgctcagccagtggcagtcgctgcatatccaccatgccgccagccatatcaccggccgcgtttcgttactggaaggcaatctggccgagctggtgctggatacgccgctgtggctggcggataacgatcgcctggtgttgcgcgatatctccgcccgtttgacgctggccggcgcgcgggtggtgacgctgaatccgccgcgccgcggtaaacgcaagccggagtatctgcagtggctttacgcgctggcggcagcgcagggcgacgatgcgcaggcgttggatattcatctgcagcgcgatgcggtgcgtcttgacgagtttgcctgggcgcggcagctgagcgccgacggcctgacggcattaattaaccgtccggactacctgcaggccgggaatagcctgcttagtgcgccgctggccgcccgctggcagaaaaaactgctcgacgcgctggcccgttatcacgaccagcatcgcgatgagccggggccggggcgtgaacgtctgcggcggattgcgctgccgatggaagatgaagcgctggtgctgttattgattgaacagatgcgcagcagcggcgtcattcaaagccatcacggctggctgcacctgccggaacataaagccgggtttaccgatgagcagcaggccatctggcagcgtgcggaatcgctcttcgccgatgagccatggtgggtgcgcgatctggcgcgcgatctgaacgtcgaagagtcgttgatgcgcgcggtgctgcgccaggcggcgcagcaggggatgattacggcgatcgtgaaagatcgttattatcgcaacgatcggattgttgaatttgcgcaattgatccgccgcctggatctgcagcgtggttccacctgcgcggcggattttcgcgatacgctgaatattggccgtaaactggcgattcaaattctcgaatatttcgaccgcattggctttacccgccgtcggggcaacgatcatctacttcgcgatgcgctgttattccctgaaaataaaaacggcgaataataacgcaaatgaaaaattaagccggtaatgtttaacagtacgttaaaaatgaaaatattaacgtactgtttttcatccaatttattgccagaaatggcgttcaggtcatgttttttatttcgacatcctcgtacccttccatgatattcacctaaatgaaggaatcatcatggctgcatcgactttttatattccgccagtaaacgttattggcgctggttctgttactgaagcgatgaatactatccagcaatacggatatcgtcgggcattaattgtcaccgacgcgatgctgaataaattaggtatggcgggtgaagtacaaaaggcgttacaggaacgggatattttcagcgtggtgtatgacggcgtgcatccgaacccgacgactctgaacgtcgaaagcggtctggcgctgctaaaagagaataactgcgactgcgtgatttccctgggcggcggttccccgcacgattgcgcgaaaggtatcgcgctggtcgcggcaaatggcggcaacatccgtgactatgaaggggtggaccgttcggcaaaaccgcaattgccgatgatcgctatcaataccaccgccggtacggcttccgaaatgacccgcttctgcatcattaccgatgtcgatcgccacatcaaaatggcgattgtcgataagcacgtgacgccggttctgtcggttaacgactcctcgctgatgatggggatgccgaaatcgctaaccgccgccaccggtatggacgcgttgactcacgctatcgaagcctatgtttctatcgcggcgacgccgatcaccgatgcctgcgcgttgaaagcgatgaccatgatttcacagaatttaactcacgcagtggaagatggcggcaatgaacaggcgcgtgaagcgatggcctatgcgcagttccttgccggtatggccttcaacaacgcgtcgctgggctacgtccacgcgatggcgcaccagctgggcggcttctacgatctgccgcacggcgtctgcaacgccgtactgctgccgtttgtgcaggagtacaactgcagcgtcgccgccgcgcgtctgcgtgactgcgcgcaggcgatgggcgtgaacgttgccgggctgaacgataagcagggcgcggaagcctgcatcgcggccatccgcgagctggcgcgtaaagtcggcatcccggccggtctgcgcgatctgaacgttaaagaagaggatatcccgctgctggccagcaacgcgctgaaagatgcctgcggcttaaccaatccgattcaggcgactcacgaagaaatcatggcgattttccgcgccgcgatgtaatcctaaaaactccccggcggcgatacgccgccgggtgaagcgccattctccccggttttacccaaatttgatgtcgcatttgcctaaaacgttgctgattccattcaggatcaaagcgcgtagcggggcttttctggcacgctgcgtttttatcccgaatggagttgaggatgaaccggtttattatcgccgatacgcaaaagtgtatcggctgccgaacctgcgaggtggcctgcgtggtgtcgcatcagcaggatcaagattgttctaccgtttctgcaagacgctttgcgccgcggattcgggtggttaagagcgatgagctatcaacggcgacgctgtgccgtcagtgcgaggatgcgccctgcgcgaacgtctgcccggaaggggcaatacgccatgaaggcgacgtctggcgagtcgatcaacggctatgcattggttgtaaaagctgtatggtggcgtgcccttatggggcgatgacggtgatgttgaccgacgaaggcgtgcaggcgctgaagtgcgatctgtgcgcgcaccggcaaacggggccggcgtgcgtagcggcctgtccgactcaggcgctgcgctgtattgagcccgccgagctggaaagattaagcgccgagcgccgccgttgggcggcgcaggcaatgtaatcggatgttcccggtcagtcatggccgggaaacaccatcaggcgtcttgctcctgccaggcgcgctcaatctcttcggcaagaattttcactcccgcctcgattttctccgggtccggcacgtagttcatgcgcatgcactgatgcgtatgcggccacggcttgtccagccccgggaagaagtaatcgcccggcaccatcagcacaccgcgttgtttcaggcgctgatacagcagctcggtggagatcggcagatccttaaaccacagccagaggaaaatcgccccttccggtttatgaatcaggcagcgttcttccggcaaatagcggcgaatggtagcgatagtttcctgaacacgctgataatagaacggtttaatcaccgtctccgacagacgcagcaggtctttacgcttaatcatttcgcacatcattgccggaccaatgccgcccggagcgaggctgataatgccgttcatattgctgatggcggtaatgattttctcgttggcgatgataatgccgcagcgcgtgcccggcaggccgagcttggataagctcatgcacagcacgatgttcggattccacagcgggcgcgcttcgctaaaaataatacccgggaaaggcacgccataggcgttatcaataaccagcgggacgccgtgctgattggcgagggcatccagcttaataagctcttcgtcggtaatgacgttgccggtcgggttggttggccgggagacgcagatcatccccgtctcttcggtgatctgcagatgttcgaagtccacgtgatacttaaactggccttccggcagcagctcaatgttgggacgggtggcgacaaacagatcctcttccagcccggaatcggcgtagccgatatattctggcgtcagcgggaacagcactttgcgggtggtgccgtcggcacggcggccggcaaacaggttaaataagtagaaaaatgcactctggctgccatttgttagagcaatattctgtggttcgatctcccaacctaattcttcgcgcagcatttgcgcaagcagggtcagaagctcgcttttcccttgcggaccatcataattgcaaagcgcatcaagggctttgccgttatccagcatatcggccagcaggctattgaagtattcattcatctccgggatttgcgcggggttgccgccgcccagcatgatcgcgcccggtgtgcgcaggccgtcattgaggtcttccatcaggcgggtgatgcctgaatgacgggtgaatttgtcgccgaaaagtgaaaatgtcatcgcggatattctgttggtcttctggaaagggaattaccataacgccagcgtcaacgcggtgcaaatcggcacaggagggagcgatttgttttttgttctgctaataggggagatattagtaatttgtgctgaaaaggctcccgccagcggcaaggagcccggtaagcgactgctattgctgtccggcccagacaaccatcactttatcagcgctgctttcacgcacgaaaccatagccctgctctagcgtcagcgtctgttgtttacccataccaatggccggatggcgggcgcggaattgggcgattttttgccagtgcgcgacattatcggatgcgctgccggcaacatcctgccagttcatatcggagcgggtaccctgcagcgggtcggagcccgtggggccgaacgggcgcgaagattcatcgccatagaagagttgcacggcgcctggcgcgagtaatagcagttccgccgcccggctgccgccttcgcggaacaggcgggtatcgtgcgaggagagatagctcagcacgttgaaatcctgcagcttgtccgccatctgctgccaggtggcgtccatgtttgcaagacagtttgctgctttcgccgcttgatcctgataatcgaaattaatcatcgcgtcgaaaccgtggcgatagtagtcgctctgcatcacgccgtggccccaggcctcgccggtcatccagaatggcgcgtcatccagcgctttctgcggattcgcttttttccagtctgccagcgcggccgtggcctgcgttttgagctgctgccaggcgtccggttcgacgtgtttcgcagtatcgacgcggaaaccgtcaatcccgtagtcgcgtacccattggctaagccagtgggtcagatagtcgcgcggcgtgtagccggctatctctttggcggcggtatccggcttgtgacgatagaaatttggcaggccagaagggatcgtcgattcggttttcaggtccggcaggaacgccagcgacatggtgaaatcgtcgaaacccggattgtcgtagtcgccgatatcggtgcggatccattttttcccccaccattgttcccagcctgctttatcgctgaagttgatgtaatcattgaagctgtgccagctttgccccgacgccggtttccaatcggtccagcgctcgccaagcgtttttttcagttcatcgcctttcagatacagcgagccgaagtgaaattcctgcatatcggcgagcgtggcgtaaccggcgtgattcatgacgatatcaaacagcacgcgtataccgcgccgatgggcctcatcaaccagttgtcgaaggtctgcttcgtcgcccatgttggcgtcaagacgggtccagtcctgggtgtagtaaccgtgataggcgtagtggggaaagtcgcctttggtgccgccgccgacccagccgtgaatttgctccagcggtgaacttatccatagcgcgttgacgccaagctgttgaagataatccagcttgctggtcagcccttgtaaatcgccgccgtggaaggtgcctatctcctgcataccgtctttatggcgcccgtagctgttgtcgttggccggattgccgttgacgaagcgatcggtcaggacaaaatagatcgtggcgttgtgccagttaaacggcgcgctggcggcgctattcgcttgttcaagcagcaggagcccattactaccagcggcgggccgcagcgtgattttgcccgctttcaccgtggcgatattaccgctataaaaatcgcggacctggcttccttcagcgaacgtttggccgacgtcgagcgtcagcggtttaccatcccatttgggacactggcgcagcagcggctgcgtactggtagtgtgctgttccgccagcgacagcatcagcgttggcgtaccggagcgggtatcgacttccagcgtatagcgcccgtcacggaacacgcgccactgcggcggcgtatcccggcagggttccagcgacagcatctgattgagttttatcgcccccgcaggctgccagcactgttggtcaaaacttatccgcaaagggcgggtacccttcgtcacctcattttgcgtcgtgaaacggcctgcatcctgttcagtgaaggcggggaagtcagcggttgtccaggcggcaaaggccatcccgggcagcagtagcgaggcaagcgcagcgagtttcatgctggagtcctgttagtggtttttatcacagtgtgtctgcgcgccataaggttgaaatcatcccgccggtaattttgcggggaggatgaaaaggggtgagtgatttagctcaaaaaatgagctataaatgagacggagatagcatttctgcgcattcgcgacggtgcagaaaccgatttcaggtgacagcaattcggaattggactatttctcttgatgctctctctgggtatttttgatactattcgcgattcaactatcgattttttgcgaaaaacaaggtgttggaatgagtaaatccgaccaggagacctaatgatatcgattcccatgcgacgatatggggctgcgatactcatgttacttacctgtatattttcaggtagtgtgttggcgacaacgcacacagcaacaaagagtcataaagcctcagtagttaagaaagtaaagaagccaagtagtatcaaggttagcagtaaacaagagtattctcgcaatagtgtaaagagcagttcacttcctgatttgcgaaaatacccttccgggacaccaaggaaaaaagcgtttctccggacggttatgccttacattacaaagcaaaatcaagcgatcacggcagatcgtaactggcttgtctctaagcaatacgacggccgttggtcgccgagcgagcaggcgcgtctgaaagatatcgcctcacgttataaagtgaagtggtctggcaatactcgccgtataccatggaactcgctgcttgagcgcgtcgacattattccaaacagcatggtggcgaccatggcggcggcggaaagcggttggggcacctcgaagctggcgcgcgtcaacaacaacctgtttggtatgaagtgcggcggcggcaattgtcgcggtgcgatgaaaggctactcccagtttgaatcggtcgagcagtcggttcaggcttacgtgagaaaccttaacacgcatccggcttattcatccttccgtaagtctcgcgcacagctgcgtaagacggaccaggaagtgactgccagcgcgatgatccacaagttgaaggggtactcgacgaaagggtcgagctataacaactatctcttcgctatgtatcaggacaatcagcgcttaattgccgctcatatgtaatcatcaatgcccggtgcgtaagcccgggcatttttcttttctgctacatcatcacttcactgtgccgatcgcggtattctttcggcgtcacgtcgtactctttcttaaacactgaatagaaatactgcagcgacggataaccgcacatctgcgaaatttcgtttatcgatagcgtggtggagaccagcaggctgcgcgctttttccagcttttcgctgtggatcaccgtgtggatggtctcgccgacctcttctttaaagcgtttctccagattagagcgagagatgccgacggcgtcgagcacctgctcaaccttgatgcctttgcaggcgtgattgcggatataatgcatcgcctgaatcaccgcagggtcagtgagcgagcgataatcggtggagcgtcgctcaatgacgcgcatcggcggcaccagcagccgctgtagcggtagcgcttcgttttccagtaatcgatgcagaagtttcgccgcctggtagcccatctgccgggtaccctgcgccacggaagagagcgcgacgcgggagaggtagcgggtcagttcttcgttatcgatgccaatgacgcacaatttttccggcaccggaatatgcagcagctcacaggcctgcaggacgtgacgtgcccgggcatcggtcacggcgataatgccggtttgcggcggcagcgtttgtagccagtcggcgagccgattttgcgcatgctgccagttctccggcgcggtctccagcccctgatagaccacgccacggtatttctctttggcgactagctggctgaaggcgtgctcgcgctccatcgcccagcgcttgccgctggaggtcggtagcccgtaaaaagcgaaacggttcacgcctttttctttcagatgcaggaatgcgctttcgaccagcgcggcattatcggtggcgatatagtgaacaggcggatagcattctggcttatggtaggagccgccgacgccgataatcggcactttgacatccgccagcagcttttctatctccgggtcgtcgtaatcggcgataacgccatcgcccaaccactctttgatgttttcgatacgcgcgcgaaaatcttcttcgataaagatatcccattccagctgtgatgcttgcagatattcgccaacaccttcaaccacctgacggtcataggctttgttggcgttgaataacagcgtaatgcggtgacgcttttcaaacatagatgatattcctgctcttaccccggtcatacaataccggctaatgcccgaattatttcaagcgccttttggcgaagtttggcggtggcgcaagttattcgggcatttttcatagtgataccgttatgttctccgcttggtagccgaatccatccagaccgccaacagtaaaatggcgcctttgacgatgtattgccagaaggtggcgacgtccatcatgctcatgccattatccagtgccgacataataaacgcccccattacggcccctgccacgctgccgataccgcccgccaggctggtgccgccaatcacgcaggcggcgatggcgtccagttcggcgatattgccggcggaaggcgaacccgctcccagtcgcgaactgaggatcaacccggcgatggcgaccatcaggccgttaatagcgaagactgccagcttggtgcgctcgacgttaatcccggagaggcgggccgcttccagattgccgccaatggcatagatacgacggccaaaagcggtgcgggtcgccataaacatgcctgccagcagcagggcggcgagtatgagcaccggcgtcggcacgccgcgataatcattgagcaaccagatagcgcccagcacgataactgcggtgatggtctgacggccaacggcgccgccagaactggtggtcgccagccctaacgcctgccggcgcatccgcccgcgccattgccagatgataaaggccgccatgccaataacgccgataccaaagccgatgccgtccggtaaataactttggccgatttgcgacatcgccggcgtggtgggcgagacggtggtaccgttggtaataccgatcagaattccgcgaaacgccagcatgccggcaagggtaacaatgaaagagggcaccttgcgataggcgacccaccatccgttccacgcgccgagcaacagccccatgaccaacgtaacgaggatggtgagcggcagcggccagccgagccagacgtcgaaaatcgccgccgcgccgccgagcagccccatcatcgagccgacggacagatcgatttccgccgaaatgatcacgaacaccatgccgacggcgaggatgccggtgatggcggtttgccgcaggaggttggagatattacgcgcgctcagataggcgccgtcggtaacccaggtaaagaacagcataatggcgataatcgcggcgatcatcacgaaaacctggagattgagccctttcagcgccggaaaaacggcaggggcggatggcgtaagtttgatttcagacgacgtgtttttcgacatggcgttcgctcctcagtgcggcttccatcacctgttcctgggtcagaccttgattatgcaaatcggccttaagcttgccttcgtgcatcaccagcaccctatcgctcagcccgagcacttcaggcagttcggatgagatcacgatgacggcgatgccttgctgcaccagttgattgataagcttgtagatttcgtatttcgcaccgatatcgatgccgcgggttggttcatcgaggattaaaatgcgcggattgagcagcaggcagcgggccagaatcgccttttgttgattgccgccgctcaggcggccaatcgccagatccggcgatgacgttttgattttcagccgctgaatcgactgctgaatgcaatgctgctccgcggcgtcatcgaggctgcttgccgggccggtgaactggtttaacgccgcgagagtgatgttcttgccgacagccatcaccggcacgatgccgtcttttttgcggtcttccggcaccatggcgatgccatgggcaatcgcctgttggcagttgttaatcgtcaccggctgtccgtcgataaagatgcttccctgccagcgccccggccagacgccaaacagacactgtaccgcctcggtgcgcccggcgccgactaacccggcgatgccaaggatttcgccgcggcggagggaaaacgacacgtcgttgacgcgcttgatatgacggttaaccgggtgccaggcggtgagatgctcgacccgcaagatctcatcgccatgactatgtggttcatttgggtacagcgcagtgagctcgcgcccgaccatcatagtgatgatgtcatcttcattcatcccgctggcgtcgcgggtgccaatatgctggccgtcacgtattacgcagatagtgtcggagatagctttaacttcattgagcttgtgtgaaatataaatacaggcgatgccgtggttttgcagatcgcgaataatcgccagcagcgtcgcggtttcttgttcggttaatgatgccgtgggttcatcgaggatcagcaaacgtacctgtttatttagcgccttggcgatctcgaccagctgttgctggcccaggcctaaatcgccaacgcgggtatcgggcgagatcgataaattcacctgcgccaatagattctggcagcgcagggtcatggtttcgtaatccagcaggccatggcgtgagacctcggcgccgagaaagatattttccagcaccgtgagatgtttcaccaacgccagctcctggtgaataatggcgatacctttacgctcggtatcgcgaatatgattcgcctgtaacgtctcgccagcgaaaataatttcaccttcgtagctgccgtgaggatagatcccgcacagcactttcatcagcgttgatttccccgaaccattttcaccgcataacgacaccacttccccggcattcagccgcaggctgacgttatccacggccttaaccgcgccgaaggctttggtgatgttcttcatttcgagtaaccaggacatagagactccgcaaaagcgatatccggcaggacgaaaatgacgccccgaggcggggcgtcagccattacagttcactctttttgtggaaaccgtctttaatcaccgtggcgtcaatattctctttattgacttcaattggcgttaacaggcgcgaggggacatcttttaagccgttattcaacgtggcgtcagccttgggttgctggtcattgcctaattcaacggcgatttcggcagcgctagtggcaagcgtggtaatcggtttataaacggtcattgtctgggtgccggaaataatacgtttcacgccagccagatcggcatcctgcccggaaatggcgactttacccgccagcccctgggcgcttagcgcctggatagcgccgccggcggtcgcatcattggaagccactaccgcgtcaattttgttgttattcgccgtcagcgcgttttccatgatttttaacgcattttccggcagccagccgtcgacccactgatcgccgacgatcttaattttgccgtcatcgacataaggtttgagcaccttcatctggccggcgcggaacagtttggcgttattatccaccggcgagccgcccatcaggaaataattaccctgcggtactttgtcgaccaggctctgggcctgcatttcaccgactttttcattgtcgaaagaaatataaaaatcgatgtcagcattattaatcatgcgatcgtaggcgaggactttaattccctcctgcctcgcttctttaataacgttactgagcacctggccgttgtaaggaataattactaaaacatcgacgccgcgattgatcatattttcaatttgcgacatttgcgtttcttcgttgccattggcggattgcacaaatactttggcacctaatgattccgctttattgacgaaaatatcgcgatctttttgccagcgttccagacgaaggtcgtcgatggccatcccaatcttaacttctttagccatgcccgccatgctggcgagaaggagcgatgaggcgcagagcgtaaggcaaaggttctttatcttcataataacgataccttttcaaagggtaggtaaggcgtacaggaataaacttcaggttgcagatacgttgcagattcttaacggggaagcgagggctggcaattacctgttcttattttcgcattatgaaatttagtttgttttgtaatttatgaccgcgatcgtattttattcaagagtatgcaggttatttcatttcacatccatcataggattccataaatgatgtggggaggaattatttttgcgagctggcgcacgtttgtggattctctcaatggcggtgtgaaataacgtaattgaggaaggcgaaagtggaattctatattgacgtataacttgttactcgccgcacccctgaatatggagttctctatgcagacctatttcgatcaactcgatcgcgttcgttatgaaggcccgaaatcgactaacccactggctttccgtcactacaatccggatgaattagtactgggtaaacgcatggaagaccacctgcgtttcgctgcctgctactggcacactttctgctggaatggcgcggatatgtttggcgtggggtccttcgatcgtccatggcagcagccgggcgaagcgctggaaatggcgaaacgtaaagccgaagtggcatttgagtttttccataagttgaatgtgccgtattactgcttccatgatgtcgacgtttctccggaaggcgcttcgctgaaagagtacagcaacaacttcgcgcagatggtggacgtactggtggaaaaacagcagcagagcggcgttaaactgctgtgggggacggcaaactgctttaccaacccgcgttatggcgcaggggcggcgacaaaccccgatccggaagtctttagttgggcggcgactcaggtagtcaccgcaatgaatgcgacccacaagttgggcggtgaaaactacgttctgtggggcggtcgcgaaggctacgaaaccctgcttaataccgatctgcgccaggagcgcgagcagattggccgctttatgcaactggtggttgaacacaaacacaaaattggtttccagggcaccctgctgatcgagccgaagccgcaggagccgaccaagcaccaatatgattatgatgcctccacggtttacgggttcctgaaacagtttggtctggaaaaagagattaaactgaacattgaagccaaccacgccacccttgccggccactctttccaccacgagatcgccacggctattgcgctgggcctgttcggttcggtggacgcgaaccgcggcgatgcgcagctgggctgggataccgaccagttcccgaacagcgtggaagagaacgccctggtgatgtatgagatcctcaaggcgggcggcttcaccaccggcggcctgaactttgatgctaaagttcgtcgccagagcaccgacaaatacgatctgttctacggccatatcggcgcgatggacactatggcgctgtcgctgaaagttgcggcgcgcatgattgaagacggcgagctggataaacgcgtggcgaaacgctacgccggctggaacggcgaattgggccagcagatcctcacaggccagatgaccctgaccgacatcgcgcactatgcgactcagcataacctggcgccgcagcaccacagcgggcatcaagagttgttggaaaacctggtaaaccattatctgttcgataagtaataccgacaaaagtgcccgctaaaaccgggcactggctgtaaaccatttgtgctgcgccacgctttgccgtggcgttcgcgttaaggagacgctgcatgtatatcgggattgatttagggacctcgggtgtaaaagccattctgctcaatgaacagggcgacgtactggcgacgcataccgaaaaactgaccgtctcgcgcccgcatccgctctggtccgaacaagatcccgaacagtggtggcaggcgacgaataccgcgatgcaagcgctgggcgcgcaacactccctgcgcgaggtaaaagctttaggcatcgccgggcagatgcatggcgccacgctgctcgataaacagcagcgggtcctgcgtccggcgattttgtggaatgacggccgctgcggcgaagagtgcatgctgctggaagaaaaagtcggcgcttcgcggcaaatcaccggcaacctgatgatgccgggttttacggcgccgaagctgctgtgggtacagcgtcacgaagccgaaatctttaaacaggtcgataaggtcctgttgccgaaggattacctgcggctgcgcatgagcggtgagtacgccagcgatatgtccgacgccgccggcacgatgtggatgaacgtcgcgcgtcgtgactggagcgatgaaatgctcgccgcctgcgggctcagccgcgacaatatgccggccctctttgaaggctgcgaggtgaccggccaactccgcgcagaggtcgctcaggcgtggaatatgccgcgggcgctggtggtagcgggcggcggcgataacgcggcaggcgctgtcggcgttggcatggccgatgcggggcaggcgatgttatcgctggggacctccggcgtttatttcgccgtcagcgatggttttctgagtaaaccggaaagcgcggtgcatagtttctgccacgccctgccgggccgctggcacctgatgtcggtgatgctcagcgccgcgtcttgtctggattgggcggcaaagctgaccggcctcggcagcgtaccggcgctgatcgccgcggcgcagtcggcggatgacaatgccgacccggtgtggttcttgccttatctttccggcgagcgtacgccgcacaacaatccgcaggctaaaggcgtgttcttcggccttacccatcaacatggtcccgccgaactggcgcgggcggtgcttgagggggtgggttacgcgctggctgacggcatggatgttgtgcactcctgtggtgtgaagccagacagcgtcacccttatcggcggcggcgcgcgcagcgcatactggcggcaaatgctcgccgatatcagcggacaacagctggatttccgcaccggcggcgatgtcggcccggcgttaggcgcggcaagattggcgcaactggccgttcatcatgatgcggctttctctgacctcctgccgcagctaccgctggagcaggcgcatctgcctgatgctcaacggtttgcccgttatgcgccgcgtcgtgaaacgttccgccagatttatcagcagcttaagccgctgatgtcataagttgttctcgccccatctattggggcgaattcccttcctgaatgattcgcttcgcattgatttaattcacatatttatttattccgaattgttgattccaacttgctgaaaccgccgcaaccggcgattccccggtcataatgagggttaccatggccagggaggcgcaatgaaattaaaacgtacgacggcaagattagtcatgctgctgggctcgctggtttacctcatcggcatctggcgaacgtgcccgctattcagcggtaaaggctattttcttggcgtgctggtgatggggatgtttgctgtcctcacccatcaacgaacggagcaggaagcgcagcgagatgatgattttatctccctgtgccggttggttctgttgctatcggcaggattgctgctggtcggcgcctggtttgttccggcgccgtggcgcgaaaaaagtatttacgtgatagcatggtttgtctgtatgtacggtgcgtcagcaacgtcttatcccgctaaagtcgcggataaagcgcgcaataactcagtggaataaactgtcaaccgacggtgaagagaggtcgtcggcaatggaaacaaaagcgacgacctattcacccgcgtttcatctgatctcatggattgcgctgattggcgattttcagctcaccaaccgacggcgatcaattcgctgaaccagcgtagacagcgccaggctacccaacagcgcggcggcgaaaatccacacaatatccagcaagggccagcggcttagctcaaggccgctggcgcgcagagcgtgaataaacaatgcgtgaaagccataaatgcctaatgaatgtctggagattaacgcgatacccgggagctcacggctattgaggatgtttttgcccagggtgaataacgagattgcacagataaacacagccggcccgcaatacagataccaggtatcgccaaaatcgcctcgccattgcagttcatgcagcgtgccgcgtgaaatgacccacaccgcggcggtaaacagtagcgcgcacatcagggtcagtcttcttctgtcggtattcatggcgccgatcgcccggcccagtatcccgtacagtacgtagtaaaaggtatcgccgttgatatagaggtttatcggtagccattcaatgccgcccgccttgatgcttaccatattggggttggcgatgaggccaatcaccagcatcagcgccagcagcattttgccgctgacctgcttcacctgaatcagcggcgagagcagataaatcaccacaatggcaaagaaaaaccacaggtgataaaacaccggcttctgcagtaaattttttaatgacagctcaacgttgatgtgggtaaaaagggtgatatagagcagcgccagcgcgctatagaacagaatacacagcgcgatgcgcagataatggcggggctgggcgctgcgttcgccaaaaaacagatatcctgaaatcatgaaaaaaagcgggacgctgacccgtgatgccgagttaagcagattcgcgatatcccattcgaacaagctgatgctatgaggatgggtaatgtaccaggtggtactgtgaatcattactaccatcaggcatgctatgccgcgcaagttggtaatccagcttattttttcctgcatctgtacctcattggcccctgcgtaaaaagagtctgactcccgtcgtttgtcgtcatcacaatggaatattctgagtttttcgccacactcttgtagagcatcagtgagattcgcaaaatgtttggctagttttacatggtctgcacgataacaattggctaacaaggcggttgagaaaaatggtgatgaaatatttcgtatctgccctggcggcgctgctgctggtcggctgcagccagacacctgctcaacccgttcaaaaagcgcaaaaagcacgtattacgccgcaaactacgctgaatatggaaaaattatgcaaggatcaggcggcgttacgttacagcaccgacacccgtcgcgtcgacgtcaatcatttcgagcagttccaggcaagctatgagctttccggtctgacttcgcggaatgaacgctttgtctgttcttttgatccagacggccagtttttacatctttctatgcgctaaatgcggcttaaacgccgcacgatggcgccgctttgctcaaatttcgctaaacaaaggccgtttcatactgtatatctcgcagccagcgggtatactgatcccttcctttaaatccacacgtatccagcacgaaataatatgcaaaagtttgataccaggaccttccagggcctgatcctgaccttacaggattactgggctcgtcagggctgcaccattgttcaaccactggacatggaagtcggcgccggcacatcccacccaatgacctgcttacgcgcgttggggccagagccgatggcgaccgcctacgtacagccttctcgtcgcccgaccgatggccgctatggcgaaaacccgaaccgcttacagcactattaccagttccaggtggtgattaagccgtccccggacaacattcaggaactgtatctcggatctctgaaagagctgggtatggatccgactatccacgacatccgcttcgttgaagataactgggaaaacccgactctgggcgcctggggattgggttgggaagtgtggcttaacggtatggaagtgacgcagtttacttacttccagcaggttggcgggctggagtgtaaaccggtcaccggcgaaattacctacggcctggagcgtctggcgatgtacatccagggcgtggacagcgtatacgatctggtctggagcgatggcccgctgggtaaaaccacttacggcgacgttttccaccagaacgaagtggaacagtccacctataactttgaatatgcggacgtagacttcctgttcacctgcttcgagcagtacgagaaagaagcgcagcaactgctggcgctggaaactccgctgccgctgccagcctacgagcgtattctgaaagccgcccatagctttaacctgctggatgcgcgtaaagccatctccgtcaccgagcgtcagcgctatattctgcgtatccgcaccctgactaaagcagtggcagaagcttactatgcttcccgtgaggcccttggcttcccgatgtgcaacaaagacaaataagaggcggccatgtctgagaaaactttcctggtggagatcggcaccgaagagctgccaccaaaagcactgcgcagcctggctgaatccttcgctgccaactttactgcggaactggacaacgctggcctcgcgcacggcgccgtcgaatggtttgccgcgccgcgccgtctggcgctgaaagtggcgaatctggccgcctcgcagccggatcgtgaagtcgaaaaacgcggcccggccattgcccaggcgtttgacgctgaaggtaaaccaagcaaagcggccgaaggctgggcgcgcggctgtggtattaccgtcgatcaggctgaacgtttgaccaccgataaaggcgaatggctgttgtatcgcgcccacgttaagggggaaagcgcgcaaacgctgctgccgaacatggttgcgacctcgctggctaagctgccgatcccgaaactgatgcgctggggcgcttctgacgttcactttgtgcgtccggttcacaccgtgaccctgctgttgggcgatcaggttgtcccggcgaccattctgggtatcgcttccgaccgtatcatccgcgggcaccgttttatgggcgagccggaattcaccatcgacaatgccgaccagtatccgcagattctgctggagcgcggtaaagtgatggccgactacgccgagcgtaaagccaaaatcaaagcggatgctgaagcggcggcgcgtaagattggcggtaatgctgacctgagcgaaagtctgctggaagaagtgacctcgctggtcgaatggccggtagtgctgacggcgaagtttgaagagaaattcctcgcggtgccatccgaagcgctggtttacaccatgaagggcgaccagaagtacttcccggtctatgcaaacgacggcaaactgctgccgaacttcatcttcgtggcgaatatcgagtccaaagatccacagcagatcatctccggtaacgagaaggtcgttcgtccgcgtctggccgatgccgagttcttcttcaataccgaccgtaaaaaacgtctggaagataacctgccgcgtctggaaaccgtgctgttccaacagcagctgggtaccctgcgcgataagaccgatcgtattcaggcgctggcgggctggattgccgaacaaattggcgctgacgttaaccatgcgacccgcgcgggcctgctgtccaagtgcgacctgatgaccaacatggttttcgagttcaccgacacgcagggcgtgatggggatgcactacgcgcgccatgacggcgaagcggaagatgttgcggtcgcgctgaacgagcagtatcagccgcgttttgccggcgatgcgctgccgtctaaccctgttgcctgcgcggtggctattgccgacaagatggacactctggcgggtatcttcggtatcggtcagcatccgaaaggcgataaagacccgtttgcgctgcgccgcgccgcgctgggcgtactgcgtatcatcgttgagaagaacctgaatctcgatctgcaaacgctgaccgaagaagcggtgcgtctgtatggtgagaaactgactaacgccaacgtcgttgatgacgtcatcgacttcatgctgggccgtttccgtgcctggtatcaggacgaaggctacggtgttgacactatccaggcggtactggcgcgtcgtccgacccgcccggcggatttcgatgcgcgcatgaaggccgtttcgcatttccgtacgctggaagagtcctccgccctggcggcggcaaacaaacgcgtatccaacattctggcgaaatctgacgagaccctgaacgatatcgttcatgcctcggtgctgaaagaagcggcggaaattaagctggccggtaatctggtggtgctgcgtgataaactccagccttacttcgccaaaggccgttatcaggatgcgctgattgagctggctgcgctgcgcgagccggttgatgagttcttcgagaatgtgatggttaacgctgaagacaaagatgtccgcatcaaccgtctgacgctgctgtccaaactgcgcgagctgttcctgcaggttgcggatatttcactgctgcagtaactatctcgagaaaggtcaaaagcctgccatccggcaggcttttttttgccttatcgcaatggtgaaaaaataatcttgaaatccaggctcgggcctggctatcctatgccccgacgaatccctcgtctcactggagcgcacacgacaaatgaacaaacacgactgatgaatttcacgccttacctcgcaaacgctgcgggtaggggagtattgatttcattcaggagtgcttatggctcattgtgcccacaccccctcttttgttttacatcaggtcacctgtcagttcgcgacgggacagacgctttttggcccgctgaatttatcgctggaaccgttgctttgcggccttgtcgggcgaaatggcgttggcaagacacgcctgttgcgtctgctggcgggcctcgattctccctcctgcgggcatatcgaacgatcggccaccgttgcctgggtggcgcagcagccgaccctcaccgccgggacaaccgttgcctccctgctgggttatgcgccagtatttgacgccttgtcccgccttgaacaggggaaagggctggcagatgacttcgaactgttagatggccgttgggatctgcccgatcgcctgagttcagcctttcgcgatgccgatctcccggcattctccgccgatcgtcccgctttttcgctcagcggcggcgaacgaatgaaggcgctgctgtgcggcgcattcgtttccggcgcggactttctgctgctggacgaacccacgaatcatctcgatcgtcagggccgggagtggctgtatcagcagctggaaatctggcggggcggggcattaatcgccagccacgaccgtgaattactggctctgatgtcgaggattattgagctaacgccggcggcgctgcgcagctacggcggtaattatgccgaatatcagcggcagcgcgaagcggagcaacaggccgcccgctcggcgctggagcatgccgcaatcgaacggcggcgcacccgggcgcggatgcaaaaggagcatgacgcggcccaacggcgctcggctcagacgctgcgtaccgtcgatacgctgaatatcgcctctttcgagcgtgtgaagtacaaaggggcggcaaaagagcgtccgggaacgctgcgccgtcagcatcgcgaacagaacagtagtctgaatgccgccgtgcaccaggcgcgggagcgggtagaagaagataatccggtgatgttcacactgcttggcagtgaagtggctgccggcaagcaggtactggtgctggaatcgctgcagttggctcactcatcccccgcgccgctcgactggcgggtggatggcccgatgcgcatcgcgctaaaggggccaaacggctgtggcaaaacaacattattgaaaaccctgatggggctggagcaggcaaccgctggcgacgtccggctgtcggtgagtgcggcgtatctcgatcagcatctgacgcagctggatttatcattgtcggtgatggcgcaccttaacctgggcgataccccactggatgagggagtactgcgtagccgtctggcgcagctccagttgggagctgacaaggtcagccttccgctggcggcgttaagcggcggcgaacgcctgaaagcggcgcttgcctgcgtgctctggcggcgggactcaactcaattgctgctgctggatgagccaaccaatcacctcgatctggcgtcgacccaggcaattgaaagcgcgctggcgacgtttcccggcgcgatgctggtggtatcgcatgacgaggcatttttacagggtctgaagctgacccattgtctggagtggagggaaacgggctggcattttgccgccctctgaatgacaacaggcgccatctgctgatggcgcctgttgacgacagataaaaaaatccccgccataaggcagggatttattattcttagcggcttgaacttacagagaagttacgttgccagctgccgggcctttagcgccgctttcgatggtgaaggaaactttctgaccttcgtccagggatttgtagccatcgttctggatagcagagaagtgtacgaacacgtctttagagccatcgtcaggagtgatgaagccgaagcctttgtcagcgttgaaccattttacgataccagtcattttaccggacatagtgaattacctttaaaaaaattagtgagccttgcggcgtagtggtctggactacagatttaaagcgataaagggaaagttcactacggggatatctaatggataacctttgaaggactgctctattcgactgctctgtggtctgtacatcaaacctgcgagcattaacgcatgttctcagtcggatagcaaactttttttcatcaggatataaaacggccctgcatcaggaccgttaccaaaagaagatagtaaaccagtttttcaatcgattagctgccttgagagctgtggattggccatcatcaggcgcatcaatttgagctccgtggatgaaggttttacccgtcgcgattcccactcttcaaccatcgcgacgctgacgcccatagcattggcgaaatcatctgtcttaaggcctgtgcccttacgcagccgttcgaattcattaaaaacgcttggggtacgggcgtgcgtagccgtttgcggctggtctttaaaaacaatctgttccaggttactcaacaaatcaaatacgggatctttatattccattgagagctcctattctgtctcactgcggagaggaaaatacatcgagccatttaagaatagtcgcaaaagcaaggaaaataataaccgaagtgattatttgtcggcgtggtttcgttaatcacccggaaaagcggcgtgcgtaaaagctaaggggatgattactaagagtgtcagcagctttggaaaatttatgtaaatgatggttagcggcaagaaaaagccagcgcagagcgctggctggattgattaggctttctgtaggtttttaccgtcatttggcttaacggcaggttggcgctggctcagtttgtatttcactaccagggcgatggtggataaaaacgccgggatcgccagcatcgtgaagatggtctcaaacgacaattgcgcctgcatcaggaaagcgccgctgaaggcaccgaggatcccgccgaagcggccgataccgagcatccaggcaacgccggtggcgcggccctgggttggatagaacccggcagccagcgccggcattgatgattgcgcgccgttcataatgctgccagcgataaacaccattacccccatcaacagcagattgctggttgagaaacccaccaggcaaacaaagacgccggtgagcagccagccgacggcaaccactttgttagggttgatcttatccattagcgcgccgaggatcagcacgccaatcccgccgccgagcgggaacagagcggtgatgatagaagcctggctcatcgaggcgccggtctcgcggataagcagcggcagccaactggtcagcagatagaaaatcagcaatcccataaaataggtcaggcacagcatcacggtgcccacggcgtagcgcggggagaaaatcacgccaatggctgacttttccttcacctggccttcttcacgtagctcaaattcaaccgcatccggcaacggcgcgatacgcttcaggatggcggcgatccgctgcgccgggtgccgtttcacgaccatatagcgtgcggattccggtagcaggaacattaacgccacggccagcagcagcggcatcacgccgccaagcaccagcacgctttgccagccataatgcgggatcatccaggccgacagaaagcctcccagcgacgaccccattgggaagccgacgaacatcaggtttaccatcagcgcgcggcggcgttccggagcatattcgctcattagcgtcgcggcattcggcattgccgcgcctaagcccaatccggtgaggaagcgcaataatgtcagttggttaaggctgctggcaaatgcggttaacaaactaaagccgccgaaaaccaggatcgacataatcagcactttcttgcggccaatacgatcggcgagcggcccggccgtcagcgcgccgacggcgagcccgaccagagcggcgctcattaccgggcccagcgcggatttctcaaccccccattcctgtaccaggtctgaggcgataaaaccaataatcgcggtatcaaatccgtccatcgcgacggtaataaaacataaggcgagaatcatccattggtacttggtgaatggatgttcgttgataaaagcctgaatatcgatggttgttttcttcatacggcattcctggcaggctgagcgggggacagaggtattgttatagtctccctcgctgtcattgatgttgtttgtgcgataatcgaacataacgccgttaatcgctcattaatcaaaccattgaacctgcctgtagacaatgtgccgccttcaggaagcgtgcgattatcgtccgctttgcgtaattccttcgccggtaattttattaattttaattaaatcaaaaagatatttactatttttttggcttaagttatcgcgttaaatgtgatgaacttaacagcgggcctggctggcgccgggaaggcgaaaaagggtattttccgcggtaagattatcaggaaagggtatcctgcaaggccgtcctggactatccttgtcagcgtctggcacgcgtgtgcctgtttgcgctttttttggctgaaggagtaaaaaaatggcgacaggaaagtcctgctctcgctggtttgcggccgttgcggccatattaatggtggttagcctgagtgggtgttttgataaagaaggcgatcagcgcaaagcgttcatcgacttcctgcagaatacggcgatgcgtagcggcgaacgtctgcctacgctgaccgccgatcagaaaaaacagttcggccccttcgtgtccgattatgcggtgatttacgcttattcacagcaggtcagccaggcgatggatgcgggtctgcgcccggtggttgatagcgttaacgccattcgcgtggcgcaggattataccactcagcgtgagccgctgcggcaggctaacggcgcgctgggcgtgctgagccagcagctggaaaacgctaaaatgcaggcggatgccgcgcatggcgcgctgaagcaggctgatgatcttaagccggtttatgaccaggtgtttaataaagtcgtgacggcgccggcgaatgcgctgcagccgctgattccggccgcgcaggtctttactcagcagctggtgcaggtgggtgattttgtcgctcagcaggggacgcaggtgagcttcgtggctaacggtattcagttcccgacgtctcagcaggcaagccagtacaatgcgctgattgctccgctggccgctcagcatcaggcctttaatcaggcctggacggcggcggttaacgccacgcgttaatcggtatatcgctgttctcccggctgacggcgtaagcgccgccggccgggcttctgctttcctcgcttacttcacctgcgggttcacgcagttcttctcaaccttgccgttcaatgcgtcaatcaggttatctaccgcgcaggccgccatgttatagcgggtctcgtgggtggcggaaccaatgtgcggtagcgcgaccacgttcggcagcgtcagcagcggcgaatcttttgccagtggttcatgttcaaagacgtcaagaccggcagcgtggatctcaccggcctgcagcgccgcaatcagcgcctgctcgtcaacgaccggaccgcgcccggcgttaatgaagatggcggaagatttcattttggcaaactgcgcttcgccgaacaggtggtgggtctcttcgctcagcggcagaatgaggcagacgaaatccgcttcctgtaacagggtatcgagatcgcagtagcgcgcattgaagcgctcttccgcctgtggatgctgccggcgcgcgttatacagaatcggcatgccgaaaccgaagtgggcgcgctgcgccagcgccatgccaatgcggcccatgccgacgatgcccagggttttatggtgtacatcgcagccgaaccagtccggcccgatgctcttggtccattcgcccgctttcacgcgttcagcgacctcaaccacccgacgcgcggtgctcagcaccagcgccatcaccgtatcggcgacggtttcggtcagcacggtcggcgtatgcatcagcaaaatcttgcgcgcgttcaatgcatcgacatcaaaattgtcgtagccgacagacacggtagaggtcgcacgcagcttcggcattttctccagtaacgcggcgtcaaccttttcactcgaacccagtaaaccttccgcctgggcgaaagcctccgcgtgctgcgaaacggtttccggacgcaggtttttcacctgggtgacggaaaagtgttcctccagacggtgtaacagatcgtcggggagcgttttatagagaatgacagacggcttcatgcgaatctccgtagcgtaagtagttcaggcgtgatgagcgccaagcggaagtttttgattcttagcaggcttaacaattaaagtaagccataccgaggcgaaaagcgccacacccatgaaaatgtacgaggcggacgggctgccggttgcgccgttgagatagccgacgaaccacgaaccaaagaaagaacccagcgctcccatactgttgatcagcgccatcgcgccgccggcgacgttgcgtggcagcatctccgggataatcgcaaagaacgggccatacggggcgtacatggccgcgccagcgatcaccagcagggtataagagacccagaaatggttggcgccgacggcccaggagccgatgaacgccagcccgccaatgagcagcagcggccagacaaacagcttacggttctgcatcttatcggaagcccaggagacggcaatcatcgcaatcgttgccgccagatagggtactgaagagagccagcctacttcgaccatccccatgttttcgccgccgctgcggatgattgacggcagccacagtacgaaaccgtacacgccgatgctccaggcaaaatattgcatacacagcagcaccacgttgcgtgaacggaaggcttcgccatagttacgtaccgctttgatgccctgctgttcgcgctccagttgttcctgcagcgccgctttttcactttccgccagccagttcacctgcgacggtttgtctttcaccagtacccaccagcagaaggcccaaatcacagcagggatcccttcaatgataaacatttcacgccagccaaaggcctggatcagataacccgatacgaccgacatccacagtacggtgaccgggttaccgaggatcaggaaagtgttagcgcgtgaacgctctgatttggtgaaccagttactgatgtaaatcagcatcgccggcatgaccgccgcttccaccacgccaaggataaagcggatggccgccagtgccgggatgttatgcaccacgccggttagcgaggcgcagccgccccacaggataaggcagataaagataagtttacgcacgctgcggcgttcagcgtaaatcgctcctgggatctggaagaagaagtatccaagaaagaaaagggcgccaagcagcgatgagatgcctttggtgatgccaaggtcttcggtaatgcccgcggccgatgcaaagctgaagttggcgcggtcaaggtacgccaggctatacgtgataaacacgataggcatgatgtaccaccaacgttttgctgcatttgttgaactgttcataggcttgcctctgtcaatgaggtgacatacgcccgccgggacgggcgctgctgtgccgcgctgcatgtagggtacaggacggctgttttaggtgaaaagattattcgcccagcgcttcgcgggtgggcagcccttcgctatcgccctgtacctgaatggccagcgagccaattttgttaccgcggttcacggcttgcgtcagcgttttgccttccagcagcgcgctgattacgccaacggcaaagccatcacccgcgccgacggtgtccaccacgttgtcgactttaatagctgcgatggcgccctgttcgccgttggcggtcttgaaccatgcgccgtcgcagccggttttaatcactaccgccttaacgccgcgcgacagatagaaatcagcgataccttccggcgtctgctggccggtaagaatcaccccctcttttaagcctggcaaaacccaatcagccttgaaggcgaggcggttcagtttctccaccatctcggcttcgcttttccacagtaccgggcgcaggtttgggtcaaaagagagggttttcccttcagctttcatcacgttggccgcatgttccagcaatgcatacgaactgtcggacagcgcggcggcgacgccgcttaagtgcaaatggcgggcgctggtgaagtaatcggcgcggaaatcttccgtcgacagatggctggcagccgatcctttacggaaatattccacgatgggatcggttccattttcgactttagatttcatctggaagccggtagcgtagcgctcgtcaacggccacgccgcgcgcgtcgatgccttctttggccagcgaattcagcacgaagcggccaaagctatcgttgccgacgcggctcacccagcccaccttcagccccaggcgcgccaggccggtcgccacgttcagttcagcgccggcgacgcgtttgataaagcgttcaacctccgccagttcgccggtttcggtggcgacaaacatcgccatggcttcgccaatggtaatgacatctaagttttccatggcttaatcctcgcgtaacagatcaacgtaatggcgggtgacggcggtcagatcgtcgccgaccagcgggaattcaataccgcgcggcgcgtcggcgggcaggttatcgagcagcgccagccagcgtgcgtccgcctggtccggtgggacggcgcgatacttctcatgatgaggctccgccgccttcacatgaatatagctgaccgcgggggccagatggcgcgcggcttcttccggcgaatcgccgacccacagccagttccccatgtcgaaagtcagcgtcaccggcatctgatggacccggcaggcggctttgaagcgctgcattggcgccagttggccgcaatcggtctggtcattttccaccaccagcgccatgccgctggcgctcagaatgtcgcgcagcgtctccagctgttggttatggatgaaatgaccgagggagagcttcagccacagggcgttgagggtttgcgcttcttcaagtaacgacgggagatggggattgagctcgccgttgtcgatgaacagcgcttgtggcgcggagtagcaggccagcagcccctgtttttcaatgtcggccgccagcgtcggcaactgcttcagttccgccgcgctgaacaactcgcggcgaatttccacgccatcggcgccggaaccggcgataaagggtaatacggcggactgcccgccaagcgctttaacgtggtcgttgccataagcggcggtgacgacaatgatttttctggccattgaacaaactcctggcgtggtggggcttaactccctattacgctagatggtaccggttccaaaggaaaggccaggatgtttaatttatgatcgtcatcacgatgaatcgttaacgagacgttgatccccggacaataagctcgccggagaagacccgctcgcagatggggtcgctgccgccttcgatacgcctgacgacctgttcgaccgaagcatagccaatctgccaggttggctgtttgagggtggtaataccgacgcccgccagctccgcccattccagctcatcgaagcccagcaggccaatatcgctgccccagatgaggtcaacgcgcttcagtgaacgggcgacctgtaacgtcagggcgccattggcggaaatcaccgctttgcgcattccgcggtggcgggcgtggaactggcgcaggacgttatccatcatggcgccgtcgttgagcggcacctcggcgttttccgccaccacgccagcatagcgctgtagggtcgcgcgaaaggcgtccaggcgctcgcggcgggtgtttacggagccgattggctcgcttaaaaacaacagcgcttcaaaacccttttccaccagatgttcggtggcggtggtggcggcctgagtgttatccagccccacgacatcacaggcgaaatcggggattttacggtcgataagcaccatcggtagcgaggattgctgcaggcggttgaggccttcttcgcgcatgccgactgcattaaccacaatcccttcaacctgatagctacgcagcaggtcaaggtaatgcagctcctgatcgacctcgttgttggtattacacaccagcagggtgaagcctttttcgcggcaggcggcttcaatcccgcttaacacgttcacggagtaagggttggtgatatcggcgatgatcaggccaatcaggcgggtacggccatgtttgaggccacgggccatcaggctgggacggtagttgagctcggcaatcgctttttcaatccgcgccagcagatcgtcggaaagcagatgcttttcgccgttgagatagcgtgaaatgctggttttaccggtcttcgcggctttcgccacgtcgctgatggttgctcgcgccgctttcgccatgatggcttcctttgctgaaaatctgccaacaccttagcgcgaaaaatagcgatatcaagcattttgcccggcagggaggctgccgggccggaaacgagaagattactgcagcgggctgagggtaatttccacgcgacggttctgcgctttgccttccgccgtgctgttgctggcgatcgggttcgccgggcccatgccggtagtgcgaatacggttggccgctacgccctgagtgatgagcgcgctggcgacgctgtcggcacgctgttgcgacagacgcatgttcagatcgttgctgccggtgctgtcggtgtagccgacgacgttaacggcggttttctcgtactctttcagcaccatcgcgacgccggtcagggtgttggcgcctgcaggtttcaggttggcgctgctgctgtcaaaggtgacgttattcggcatgttgagcacgatgttatcgccatttcgcgtcacgctgactccggttccctgcattttttcgcgcagtttcgcttcctgcacgtccatgtagtaaccgatgccgccgcctagcgccgcgcctgccgctgcgccaatcagcgcgcctttgccgcggtcatgtttggaagaggagagcgcgccgacgcctgcgcctactaaggagccgatacccgcgccgatgccggattttcccgcttcgcgttcgccggtataagggttggtagtacaaccagaaatagccagtgtgccgctaacgatagcagcaatcatgagtacgcgttttttcatcttatttccttaatcctttttattctttgccaccgcaagcgtgacggttgattatgacgtccgaatacggagaaaattccccgtagggtatctctttttgtaagtaacattgaacggttgactaacaaaccgtcacaacacctgcattcgctgacccaggagcctgctttgccaacttcatctgcaactaaaaccatcttaaccgcggcccactgggggccaatgctggtggagacggatggtgaaaatgtgatttcgtcccgcggcgcgctggacacccccttcgccaactcgctgcaaacagcggtgcgcgaacaggtgcacagtaaaactcgcgttcgctatccgatggtgcgaaaaggctatctcgcctcgccgcaacagccgcagggcgtacgcggccaggatgaattcgtgcgggtaagctgggagcaggcacttgatctgattgatgcccagcatcgacggatccgcgaaagctacggcccgcagtcgattttcgccggttcctatggctggcgttctaacggcgtgttgcataaggcggcaaccctgctgcagcgctatatgagtcttgccgggggctataccggacacctcggcgattattcaaccggcgcggcgcaggcgatcatgccttatgtggttggcggtaatgaagtttatcaacagcaaaccagctggccgcttatcctggagcacagcgaggtggtggtgttgtggagcgctaatccgctgaatacgctgaaaatcgcctggaacgcctcggatgaacaggggatcccctggtttgatcgcctgcgccagagcggcaagcgtctgatctgtatcgatcctatgcgatcggaaagcgttgatttctttggcgaatcgatggaatggatcgcgccgcatatgggcactgacgttgcgttgatgctggggatcgcccataccctggtagagcatggctggcaggacgatgaattcctcgcccgctgtaccagcggttatgacattttcgcccgctatttgagtggtgaaagcgatggcgtcgccaaaaccgccgaatgggcggcggcaatctgcggcgtagcggcggaaaaaatccgcgaactggcgaaacttttccacgaaaacaccaccatgctgatgtccggctggggcatgcagcgccagcagtttggcgagcaaaaacactggatgctggtgacgctggcggcgatgctagggcagattggcacgcccggcggcggttttggtctttcttaccactttgccaacggcggcaaccccacgcgccgcgccgcggtgctggcctccatgcagggtagcgtagcgggcggcgtagacgcggtggaaaaaatcccggttgcccgcatcgttgaggccctggaaaaccccggcgcaagctatcagcacaacgggatgacgcggcgctttcccgacatccgctttatctggtgggcgggcggcgccaactttacccatcatcaggataccaaccgcctgattcaggcctggcagaagccggagctgattgtgatttccgaatgcttctggaccgccgccgcgcgccatgctgatatcgtcttaccggcgaccacttcgtttgagcgtaacgatctgaccatgaccggcgactacagcaatcagcatctggtgccgatgaagcgggtggtcgcgccgcgcgatgaagcgcgcgacgatttcgatgtttttgccgatctgagcgaacgctgggaggcgggcggccgcgaacgcttcaccgaaggaaaaaacgatttgcaatggctggagaccttctaccagattgccgcccagcgtggggcgcagcagcaagtgacgctgccgctgtttgccgaattctggcaagcgaaccagctaattgaaatgccggaaaatccggataacgcccgtttctcccgcttcgcggcatttcgcgcagacccgcaggctaatccgttaaaaactgcgagcggaaaaattgaaattcactcgccgaccattgccgggtttggctatgccgattgtccgccgcacccgatgtggctcgaacctgacgagtggcacggcaacgccgaggtgggtcagctgcagatactttccgcccatccggcgcaccgcctgcatagccagttgaaccagacctcgctgcgagaacgctacgccgtcgccgggcgtgaaccgctgactatccatccgctggacgcgcaggcgcgcaatatcgccgacggcgatctggtgcgggtgtggaattcacgtggtcaggtactggccggcgcggtggtcacggaaggtattcgtccgggggtgatttgcctgcatgaaggcgcgtggccggatatcgaccccgatgccggaatatgcaaaaacggcgcggtgaacgtgctgacgaaagatattccgacctcgcgtctgggcaacggttgcgccgggaatacggcgctggcatggctggaaaaatatgatgggcccgcgctggcgctcagcgcatttgatccgccggccaatgcataatccaggttgggtgctgggtgtcgtcctgccatgcgcagtcttctattcggaagccctgcgcgtggtagaaatttaccgcccgcacgtttttctgatagacctccaggcttaaccagtcgtagtgctgcttgacctcatcaagcagcgcgcggccgataccgtggcggatcgcttgcggggcgacgaaaagcgccccgacgaagcgcgaatccatcacgctgataaaccctttcagtgcgtcattctcctgccacacccaggtggcggcggcgggaagatagacatcgcgcacaacttccaggctttcccgccagtagctttcagcaatgaacggatgcgcgtaaatcgtgctttccagccataactcgagtagcgggccggtctccgtggcatcccatttttggatcatgctggtctcccggggtagcaacagcaagcggtcacgtgatcgttgactaacccgcaggcctgcataaatgaataacagatagtggagccgacgaatttaaagccgcgcttttttagcgccttagatagcgcatcggaggctggtgtggtggtgggaatttcggcgagcgtcgccgcatgggtaatttgcggctgattatcgacaaacgaccagacgaaatcgctgaatgcttcaccgttggcttccatggcgagaaacgcccgcgcattgccgatgatggcctggatctttccccgatggcggataatgcccgcatcctgtagcaggcgctcgacgtctgcttcatccatggccgctacgcgaaccgggtcaaactggtgaaaggcctgacgatagttttcacgttttttcagaaccgtgatccacgagagccccgcctgctggccttccaggcagatcatttcaaacagcttttgcggcgttctctcggcgactccccattcgttatcatgatactggatataaagaggatcctggcttacccatccgcaacgttgcatgtttctctccctttcgtcagaaaactttttcatccgccttgacggctgaaagataaagataatagttaatacagggaaaccacttcccatcaactccttatacttcaagttgcgtagaagtgggcggcagctcgaattattttgagtataaaaacacagcaacattgccgattcggctcttttggagtcgcattaatgataataaagaaatgcaatggcctccggggtgggttgatcccggcgtgcatcactatctgggtgtcgtgtgtttcatgcgctaatgcctggcaacaggaatatatcgctaacgatacaaaaagtaatacgtccgaacgctatacatgggatagcgatcaccaaccgcgttatgaagatattctcgccgagcgaatgagagcgtcagaagccccagcagggctggcgttgaatcaggccctggcgccgcctgatttgagtcacggcatgagcgtcggatggaactattcactggccagcggcgtgacctccgggccggtcgccagcttgcgtagcgatctcaatccgccgccagcgacgcgtcgcgcgggcgaaagtatttacgtcaacacgctcggctggcgtatggactatcagcagctgtggggcgtgcatccatgggcgcaggtgagctataaccagtctatctctatcgacaacaatgcgtcgattagccgtggcaaagacggtagctggggcgacgttacgctaggcgccgatatgccgctgggttcgcatctggcggcatgggccacgctttcgcaggcagataatgtgccatcgggtgaaaatacgctgtatctgatgggggtcagcgccaatttctaaatgattttgttacgcatttgaaacgcagtcgttattgttaaatctcagtaacggcgcgtttctgtgagatagcgcacactaacttgttggtgaaaatttagggaatgaatgttttgcaatgccattcattccgccataaatgcatttcattcctcgttgatggcagttcatgccgttttcccccaccggatttggggatttgggtattgtggcggcagttaatccttcaggacatctgctatgaacgctgcaaacactcaatatacccgttggctcacgctgattggcacgatcattacgcaattcgcactgggatcggtttatacatggagtttgtttaatagttctctggccaacaaactggacgagccagtaagccaggtggcattttccttcggcctgttaagtctcgggctggcattatcctcttccgttgccggtaaattgcaggaacgctttggcgtgaaacgcgtcaccatggcctccggtatcctgcttggcgccggctttttcctcactgcccatgccaacagcctgatgatgctgtggctgagcgctggcctgctggtcggtctggcggacggcgcgggctatttactgacgttatctaactgcgtgaagtggttcccggagcgtaaaggtctgatttccgccttctcgattggcgcttatggccttggcagcctcggttttaaatttatcgatagtcacctgttggcgacggtcgggctggaaaaaacctttgttatctggggcgctatcgtgctggtgatgattgtctttggcgcgatgctgatgaaagatgcgcctaatcatcccgcgacgaccaccgcgaacggcgttgtcgaaaatgatttcaccctcgctgaatccatgcgtaaaccacagtactggatgctggcggtgatgttcctgacggcctgcatgagcggcctgtatgtgattggcgtcgccaaagatatcgcgcagggcatggtacatctcgacgtggcgacggcggcgaatgcggttaccgtgatttctatcgccaacctgagcggccgtctggttctgggcatcctgtctgataagatctcccgtatccgcgtgattactatcggtcaggtggtctctctggtcggtatggcggccctgctgttcgccccgctgaatgcaatgaccttctttgcggcgattgcctgcgtggcctttaacttcggcggcaccattaccgtcttcccgtcgctggtgagcgaattctttggcctcaataatctggcgaaaaactatggcgtgatttacctcggcttcggtattggtagtatctgcggttcgctgattgcctccgtgttcggcggcttctatgtcaccttctgcgtcatcttcgctctgctgattttgtcgctggcgctctccaccactattcgccagccgaaaagcgaaatttatcatcaagcacacgcctgatagcgtcgccctccctaagctaataatgccttaccagccagatattttgtaaatatctggctgaatcacattctctccggatacttttgccatttgctgtggtctacttagcgcgctttgtagaggtttccgataaccaacccagacgcacttaattaatcttcctgtttatatcgttttaaacagggcggtttcatctcttcgtttcccaggtttgcttgcatgaaatacattaaaacgatgtcgcagcagaagctaagtttttggcttgcgctgtacatcggctggtttatgaacgccgcggtgtttttccgccgcttcgatggctacgctcaagagtttaccgtctggaaagggttgtccgggttggtggaactggtagcgacggttctggttactttcttccttctgcgcctgctgtcgttattcggccgccgggtatggcgcatattagcgacgctggtggtgctgttttccgcggcggcaagctattacatgaccttcctcaacgtggtcattggctacggtattatcgcttcggtgatgaccaccgatattgacctgtcgaaagaggtcattggctggcatctgatcctgtggctggccgcggttagcgctttaccgctactgcttatctggagcaaccgctgccgtaagacgctgctacagcaggtgaaaacgccggggcagcgggcgaaaaatatcctgatagtcgtgctggccgggctgatggtctgggggccgattcgcctgctggaagtgcgccagaagaacgtcgagcgcaattcagaagtcgatatgccgagctacggcggcgtgattgccaactcttacctgccttctaactggctgtcggcgctcgggctgtacgcctgggcgcaggtagatgagtcgtccgataataagtcgctgattaaccccgcgaaaaaattcacctacgtagcgccgcaggatcttgatgatacttatgtggtgtttattatcggcgagaccacccgctgggatcatatgggtattctcggatataaccgtaataccacgccgaagctggcgcaggagaagaatcttgtcgccttccgcggcacctcttgcgataccgccaccaagctgtcgttgcgttgtatgttcgtgcgcgagggcggggcggatgataatccgcagcggacgctgaaagagcagaatgtgtttgctgttctgcaccagttaggctttgccggcgacctgtacgcgatgcagagcgagatgtggttctacagcaatacgatggccaacaatatcgcctatcgcgagcagatcggcgccgagccgcacaaccgcggcaagaacgtggatgatatgctgctggtcgatgaaatgaaacgcggcatggagcaaaacccgagcggcaagcgtctgattattctccataccaaggggtcgcattttaactatacccagcgatatccacgcagctttgcgcagtggaaaccagaatgtgtaggggtggacagcaaatgttcgaaggccgagttgattaactcctacgataacagcgtcacttatgtggatcactttatcgtcagcgtgctggaccaactgcgggataaaaaggctatcgtgttctacgccgccgatcacggcgagtcgattaatgaacacgaacatctgcacggcacgccgcgtatgatggcgccgccggagcagttccgcgtgccgatgatggtctggatgtcggataagtatctggcgaatccggatcacgccgcctcctttgcgcgcctcaagcagcaggcggcaatgaaggttccgcaccgtcacgttgagctgtatgacaccattatgggttgccttggttatacctcgccggatggtgggattaatgagaacaacaactggtgtcgcgtgtcggcttcgaagaaagcggcgaaggaatagcagcagtggcgagattctcgccgcttgattgattttttgctaataaggcattgacgggggggcatcccagcagtaagatgcgccccgcattcggtgattggcgcagcctggtagcgcacttcgttcgggacgaaggggtcggaggttcgaatcctctatcaccgaccaaattcgaaaagcctgctcaatgagcaggcttttttgcatctgcggcccgaagaggttcgactcgagcgcttccctgattgcggcacaagcgccttatcagggctacgtccgtacagcgcttggcgaacccggtagcccggctcagcgcagcgcaagccggggcgaaaaccccgccagaatcacaaaaatcgtatttccccgcgtatctcgccagctgttcgctgttttgtgacatcttccattgcatttttttatcgatgaacagatcttttttcgcgaagcttatggctaactacagcattttccgctgtgcgttttaacgttcgcgctattaatcgctcacataatggtcacatgggaagaaattttcaccatttttaagaattgtttatcaccagatgttgcaaactattaaggggtttattctggcttatggccgctagcataaatttctctgctgaaaatagcgccaccaagtttttttaatctttgcccaccgattctcacccctgacgcaaaacccggttagctgtattgacgtttaaccattctgttgacagattgtacggcatgaggggcatttcatggagaatccgtactgcaactcagtcgttttagcgaacggaatccccatctctctcaacgccttcgggcaccaccgaccagaccgggtaaaaaataaataaaggtctggcggctatatgcaaacaacatcacagttttggagcagaataatgagtatttccttgaaaaagtcagggatgctgaagcttggtctgagcctggtcgccatgaccgttgccgcaagcgtacaagctaaaaccctggtttattgttctgaaggttcgccggaaggctttaacccacagctattcacctcgggtaccacctatgacgctagttcggtgcctatttacaaccgtctggttgaattcaaaaccggtacgactgaagttattcctggtcttgctgagaagtgggatgtcagcgaggacggtaaaacctataccttccacctgcgtaaaggcgtgaagtggcaggataataaagactttaaaccaacgcgcgagctgaatgccgacgacgtggtgttctccttcgaccgccagaaaaatgacaaaaacccgtaccataaagtctctggcggcagctatgagtacttcgaagggatgggcctgcaggacctgattagcgaagtgaagaaagtggacgataataccgtccagttcgtgctgactcgcccggaagcgccgttcctcgctgacctggcgatggactttgcttctattctgtcgaaagaatatgccgacaacatgctgaaagccggcacgccggaaaaagtagaccttaacccaatcggcaccggcccattccagctgctgcagtatcagaaagactcgcgcattctgtataaagccttcccgggctactggggcaccaagccgcagatcgatcgtctggtcttctccatcactccggacgcttccgtacgctacgccaagctgcagaaaaacgagtgccaggtgatgccgtatccgaacccggctgacatcgcgcgcatgaaggaagataaaaacatcaacctgctggaacagccgggtctgaacgtgggttatctctccttcaacaccgagaaaaaaccgctggataacgtcaaagttcgccaggcgctgacctacgcggtgaacaaagaagcgatcatcaaagccgtttatcagggcgcaggccagtcggcgaagaacctgatcccgccgaccatgtggggctataacgatgatgttaaagactacacctacgatcctgagaaggcgaagcagctgctgaaagaagcgggcatggaaaaaggcttcaccatcgacctgtgggcaatgccggtacagcgtccgtataacccgaacgcgcgccgtatggctgaaatgatccaggccgactgggcgaaagtcggcgtacaggccaagatagttacctacgagtggggcgagtacctgaaacgtgcgaaagcgggcgagcatcagaccgtgatgatgggctggaccggcgacaacggggatccggataacttctttgcgaccctgttcagctgcgctgcggcgaaagacggctctaactactctcgctggtgctacaagccgtttgaagacctcattcaaccggcacgcgccaccgacgaccacaacaagcgtattgaactgtacaaacaggctcaggtagtgatgcatgaccaggctccggcgctgatcatcgcccactccaccgtttacgagccagtgcgtaaagaagtcaaaggctatgtggttgatccgcttggcaaacaccacttcgataacgtctctgtcgaataataagcacgatgcctgaccccctctccccgcgcgggagaggcggggggcgtattcccgctattcggggagtacttttgtgagcaatacagacgccttgtcaccaggcctggcgtcactatagagaatccgggttatgttgcagtttattctccgacgtttgggactcgtcatcccgacatttatcggtattacccttctcacctttgctttcgttcatatgatccccggcgatccggtgatgattatggcgggcgaacgtggtatttcccccgaacgtcacgcgcagttgctggccgaaatgggccttgataagccgctgtggcagcaatatgcccattatatttggggcgtactgcacggtgatttagggatctcgctgaaaagccgaattcccgtgtggcaagagtttgtgccgcgcttcaaggccaccctcgaactgggcgtctgcgcgatgattttcgccgtcgccgtcggtattccggtgggcgtgctggctgcggtaaaacgcggctccatctttgaccacactgccgtgggtctggcgctgaccggctactcgatgcctatcttctggtggggcatgatgctgattatgctggtttcggtacagctgaatctgacgccggtctccgggcgtatcagcgatacggtattccttgacgataccctgccgctgaccggttttatgctgattgacaccgccatctggggcgagcagggcgactttattgatgccttaatgcatatgatcctacccgccatcgtgctgggtacgattccgctggcggtgatcgtgcgtatgacccgctcatcgatgctggaagtgcttggcgaggattacatccgtaccgcacgagctaaggggttgacccgcatgcgggtgatcgtcatccatgcgctacgcaacgcgatgctgccggtggtgacggtgattggtctccaggtgggcacgctgctggcgggcgccattctaaccgaaaccattttttcgtggccaggtttaggccgctggcttatcgatgcgctacagcgccgcgattatccagttgtgcagggcggggttctgctggtggcgacgatgattattctcgtcaacctgctggtcgacctgctgtacggcgtggtgaacccgcgtatccggcataagaagtaaggggccatcatgtcacaatttacagaaaataaagttgtcgccgcaccggtgccaatgaccccgctgcaggagttctggcactatttcaaacgcaataagggtgccgtcgtcgggttggtgtatgtggctgtgatgattatcatcgcggtattcgccaactttctcgccccctataacccggcggatcagttccgtgattcgctgctggcgccaccgttctggcaggatggcggcagcctggcgcatctgctgggcaccgatgacgtgggtcgcgatattctctcacgcctgatgtacggcgcgcgcctgtcgctgctggtgggctgtctggtggtagtactgtcgctgatcctcggcgtggtgctggggctgattgcaggctatttcggcggggtggtggactccatcatcatgcgcgtggtcgatatcatgctggcgctgcctagcctgctgctggcgttggtgctggtggcaatcttcgggccgtcaatcgtcaatgcttcgctggcgctcacctttgttgccctaccgcactatgtgcgtctgacgcgcgcggcggtgctggtggaagtgcaccgcgattacgttaccgcttcccgtgtggcgggcgccggcgcgatgcgccagatgttcgttaatattctccctaactgtcttgcgccgctgattgttcaggcgtcgctgggcttctctaacgccattctcgacatggcagcgctggggttcctcggtatgggcgcgcagccgccgacgcctgagtggggcactatgctttccgacgtattgcagttcgcgcaaagcgcctggtgggtagtgaccttcccgggtgtggcgatcctgctgacggtgctggcatttaacctgatgggtgacggtctgcgtgacgcgctcgatcccaaactgaagcagtaagaggttcgagatggcgttattaaatgtagataagttatcggtgcatttcggcgatgagaatgcgccgttccgcgccgtagaccgcatcagctatagcgtgaagcagggcgaagtggtcggcatcgtgggggaatcgggttccggtaagtcggtgagctcgctggcgatcatgggactgattgattaccccggccgggtgatggcggacaaactggaatttaacggccgcgatttgcagcgtatttcggaaaaagagcggcgccagctggtgggggcggaagtggcgatgatcttccaggatccgatgaccagcctcaacccgtgctttaccgtcggctaccagattatggaagcgattaaggtccatcagggcggcaataagcaaacccgccgccagcgggcgatcgacttgctgaacctggtgggtattcctgacccggcgtcgcggctggatgtttacccgcaccagctttccggcgggatgagccagcgcgtgatgatcgcgatggcgatcgcctgccggccaaaactgctgattgccgatgaaccgaccaccgcgctggatgtgaccattcaggcgcagattatcgaactgctgctggagttgcagcagcaagagaatatggcgctggtgctgattacccacgatctggcgctggtggcggaagccgcgcataaaattatcgtcatgtacgcgggtcaggtggtggagaccggtgatgcgaaagatatcttccgcgcgccgcgtcatccttacacccaggcgttgctgcgggcgctgccggagtttgcccaggataaggcgcgtctggcctcgctaccgggtgtggtgccgggtaaatacgatcgtcctaacggctgcctgctgaacccgcgctgcccctacgcaacggataaatgccggagcgaagagcccgcgcttgcggatctcgacggcgaccgtcagtcaaaatgccactacccactcgatgatgccgggaggcctggattatgagtacgcaaaaggccgccacgcaacaaccgctgttgcaggccattgatctgaaaaaacactatccggtgaagaaggggctgtttgctccggaacggctggtgaaagcgctggacggcgtctcctttactcttgagcgcggtaaaacgctggcggtagtgggggagtcgggctgcggtaaatcgacgctgggtcgtttgctgacgatgattgaaattcccactggcggcgagttgtattatcaggggcaggatctgctcaagcacgacccgcaggcgcaaaagctgcggcggcaaaaaatccagattgtgttccagaacccgtatggttcgctgaacccgcgtaaaaaagtggggcagattctggaagagccgctgttgattaacagcagcctgagcaaagagcagcggcgtgaaaaggcgctggcgatgatggcgaaggtgggcctgaaaacggagcattacgatcgctacccgcatatgttctccggcggtcagcgccagcgtatcgccattgcccgcgggctgatgctggatccggatgtggtgattgccgatgagccggtctcggcgctggatgtttcggtacgcgcccaggtgctgaacctgatgatggatttgcagcaggatttagggctgtcctacgtgtttatctcccacgacctgtcggtcgtcgagcacatcgctgatgaagtcatggtgatgtatcttggccgctgcgtagagaaggggaccaaggatcagatctttaataacccgcgtcatccgtatactcaggcgctgctgtcggcgacgccgcgactgaacccggacgatcggcgcgagcgcatcaagctgaccggcgaactgccgagcccgctgaatccgccgccgggctgcgcctttaatgcgcgttgccgccgacgctttggcccatgcacccagcttcaaccgcagcttaaggattacggcggccaactggtggcctgctttgccgttgatcaggatgagaatccggagaaagcgcgggcgtgatgggaggcgggttgtcgcgtgatgatttcggcgggagatggctggaatgcgcctcgcagattgccaaagggcggggtgaaggcgatgacacggagcagtagaatcgacgccaagccgggttcgcccggtgaggcgcaatgttgcgggggcttgaaccccggcggcatagataagttgctggaaagagaaaaccctcgcacgttgctggtgttaaccaggcaactgaacgagggctatcgacaactccagacaagttaaagatagccgcgaacggttgccattgcaatacaggcggctctatgacgctcacacagttaggtctgatcttatgggacgatctggcggcgccgataattgctggcatcgtggtcagtattatcgtcagctggatgcataaccagaagtgacggaccggcgggcgtgagtctgctgcgttggcaatttgcgcccgaacaggccgcaggaattctcctgcggcctttttcgtctttacctggcggcacgcagaatgtggttggatgctggaatgcgcctcgcagattgccaaagggcgtggtgaaggcgatgacatggagcagtagaatcgacgccaagccgggttcgcccggtgaggcgcaatgttgcgggggcttgaaccccggcggcataaataagttgctggaaagagaaaaccctcgcacgttgctggtattaaccaggcaactgaacgagggctatcactaactccaagcaagttaaagatagccgcgaacggttgccattgcaatacaggcggctctatgacgctcacacagttgggtctgatcttatgggacgatctggcggcgccgataatcgctggcattgtggtcagtattatcgtcagctggatgcataaccagaagtgacggaccggcgggcgtgagtctgctgcgttggcaatttgcgcccgaacaggccgcaggaatcctcctgcggcctttttcgtatttactgcggatatggcacccaactgccgccgttgagttgcacgtagggtttgccctgatactgaataacaatagcgttggagttttccgataccgccgcggtctgcggcaggttagcggtgtactgctgccagttgacgttatcctcggtaaacatcttgccgtccagggcgcgcaccaccagttcagaaaccgcgaggtagctggaaggctgtgtgatttccaccgcggcgccctggtgcggcgccttcatgccgaagaatttcaccgccgcagggacgttggtaatcgatgggcttgggatatcgcgcagcccggaaacctgcatcttatcccccttcagcgcggcgccgtgttccggcaccaccaccaccatcactttacgccccgatttttccagttcggtgaagaaggcgtccagctcatcaaagaatttctgcgcgcgagctttgtagtctgccgttttgctttggccgggataatggttgccatcgtgcagcggcagcgtgttgtagaaggtcgcggtacgcggcgtgttaagcttctcggtggactgtagccagcgatcgagcgtcgcctggtcgtcgtaaaccggcgatccgtcgaagccttgcaggataaccggcaaaccgctctgatccatcaatggactttgcatgccgccgagtgagcgaacctctttgaggaagtcgccgaatacgccgttatgccccagcatcagctgttgggtaaagcccagtttcgccagattttcgaacagatagcactcgctgcccgatggctgatacaggttgctatgagatagctggccgcagctggcgcgcagcaggcgaaccgctgccgggccgctgtaggaggtcgcggagttgaagtttttgaagacaatatcgaaatgtttccacagcgggtgatccatcagcccggcagcctcgatgtccgaccatgacagggaacagatgttgatcaccagcagatcaaacggctgcgcatcctcaggaagctgagcggggaatgacgtttttcttttctgttcagaagcatagaaagttttcagccagttgctgaggttagccgaggttggcggttcggtctgcggtgggatatcgccgctggcggcagcgctggtggatgccgcggctgttgtggttccaccggttgttgccgccggcgtggccgctgccgtggtcggctgaccggcaggccataaggtgaaggagggcagcagcgggctgataaccagccagaccatgatagccgaaacaaatacggtaacgcgtagccactggctgatgaatagccacagcaccagcagcacaaagaaggcgccgaccatattccagttaataaagcgggtgatcagatcccagatgtaatcggcgctgaaaccggcaatttgcgaaccctggctcatgatgctttccggacccggtaaccaggtatcatgccagaacagggcaaagccgagcggaatcgctatccagtggcgtacccggtgcagtttttctcgggggatcggcaccagcagaaaggcgaggaacaccaggttaagcatcggatggaagttcaggtaccccgcccacagcagggcaaacttcaccagaaaatagaagttccagccagacaggccgcgccagtactgccatagcggaagcggcgtagcggtagtttttgctttggtcattttttcagtttgccctgcctggtcgcattatcccggcgcagcacgccggctggtttcacataacggggtttaaagaacatcaaacgcaaagtcgtgcgaatacggcgctgataatggcgcgttagatatcccagcgggaaaaacagcagggcgcacaatacgatcagctgaatgatatcggcgatagacatcatgaccgcggttctccgtcggtggagagccgccagggttccgggattcgccgccactggcgcccatcgtgcttaacgttaagggcttcgtttttgcctatggtaattggcagcggcgtgttccagttgtccggggagaggcctcgcatcaacaggatttccgctgaaatttgcttgtcttcaaaccaaatcatacggttagagaaaatgtctccggtcggtaatgggaagatatggtttaatgcagtgtcgaggtcatttacccggcaaaacgataagaacagcactaatcgattattgccgatcgtcacgatatcgcccatgcggttaggtttacacagggttaatgcctgttcaacgcgtagccccggcgcagggcgtaacgccaccatcacccctttgctatccggcggcagcagcgtgttggccatgatattaccgactgcttcacagaaggcgtcccacttttgatagccgcgaagtttaagcggccggctccaggtcaacaacgtgttgaagtcttccggaacgtgacgagtaaatttctgcttttgcacgctttcaatgagcgtcaggcagcgtgaaagcccggcgctgcaggggatcaccatgttggcgccgctgcttagcagcaagcgttcatcagtggcgcgcaggctcggcgtttgttcacgtaccacgatttttagggcgctgccgcgctggcgacgcagggtatggatatagcggccgagctgctctatttgttcgttctgggtgatggaaaatagcaaggtggccgcttgtgcggtacgaccggcttcaaagacggcatcattggtttcgaacagcgtccagtattcggaaagcgcgggggccccttccagcacgcgcaaattactgaggacgattttttcgtcgctgcgcggctgtaccaccgcttcttcgttttgcgccagtcgccagccctcatcatcgtgtaaaataaccaactgttgctgcgcgctaatacctttctcactgccccaccatgcgatatcaaatagatggctatcaccctgataacgaatgctcgccagcccggaaagggctcgatactggcgtaataacggggaaagttgtttgtcggtatcgttagcagaattaagtatcataagagagcagttatgatatttggcccatcgattcgatttttctacccaatggagtaattcttctgtttttatattttgccaggaattttctgtacatagcagaataaataaataattgccaggatctaccgaacaaagcaggtcgcggtgcaactccttcaggccttccgggcgatcgggcatggtgaataatgcgattttattagggccgcgatctttttttaatgacatgacttctttagggttttttcccatcactatggcggcgactttgctgtcctgcgcctggctttccagcgtttgattcatcaggctgacggcgtcggcatagcggtcgacattaagccaccacaccccgccaacgggcatatggcatacttcgtcccataacgatgaaatacccaacgtatatacaatatccacgatgtccctcgcgcgccctatttacaatgattagtttactagcgaaagcgtgagagtaaacctaacattgaaattaaaggacatcagttttagcatgtacacgtaattttagggatgagcggtttacacttcctggttttataatgtgtttttcgaatggacagagaaatgccggaaaaagaccctgcggtacctggcgatgcgacgctgggatataccttccaaaatgatttcctggcattaagccgggcattttccctgccggatattgattaccacgatatttcccgacgcgaacagctcgccgcggcgttgcaacgctggccgctgttggccgaattagcagagaaaaagtaaggaagccgtcgatggcgattctgggattacaaggcatacgcggcggcgtaggcaccacctccattaccgccgcactagcctgggcgctacagctgctcggcgaaacggtgctggtggtcgatgccagcccggacaatatgctgcgcttttttttcaacgttgatttcgaccatcacaacggctgggcgcgctcgttgattgacggtcgcgactggcgcgacgccggactgcgctacaccgcgcatatcgatcttctgccgtttggccgcctgacccctggcgaacgcgagcacgttgataaactgagtccgaccctggaacccatcgcagcgcaaatcaaattgctcgatcagcaggggagccaccgctggctgctgcttgatattccggagggctactctccgcttacccgcgaactgctgagcgtctgcgatcgtgcgctacaggttgtgcaccccgacggtaacagtcatatacgtctgcatcagcaggcactgcctgccaacgcggatattttgattaacgacctgcgcgtcggcagccagctgcaggaagatctctatcaactgtggctggaaagccagcggcgtattttgccggtcacgattcaccgcgatgaagcgatggcggagtgtctggcggcgaaacagcctcttggcgaatatcgccaggattcgctggcggcggaagaggtgttaacgctggccaactggtgcctgctgcactatgccagggagggggcggcatgatccgcctgagtacgttgctgctggcgccgccggtgggcgagcgcttgagtgaacgttatgatgactatcgtcagcatggcgcgtcggtgctctcggcttttctcggttgcctgtgggcgtcgctggcgtgggcattcatgccgcttgagacgccgcgctggcaagctattcgcgaacaccatggcgactattttccgcatattaatccgcatcgcccacgcccgttagatccgctgcgctatttgctgcagtcgctctggctgctggcgacccgggtgccggaagcggataaaaaaataaactggcgctcgctggcggcgctggaaggggttcacgggcgctacgcgcagtggctggaaaaattaccggagaaggtcaacacccgtaccggccacctcgataagcagaaagagcttgaacatctgcatccgcagttgcggcggctggtacttggcaccattaccttcttctcgctgattctggcgcttctgtgtatcacccagccgtttaacccgctgtcgcagtttatcttcctgctgttactgtggggcgtcgcgctgctggtgcgacgtattccggggcgtttctccgccctgatgttgatcgtgttgtcattgaccgtttcttgtcgctatatctggtggcgctatacctccacgctgaactggaacgatccggtcagtctggtgtgcgggctgattttgctgtttgccgaaacctacgcctggattgtgttggtactgggctatttccaggtggtgtggccgctgaatcgccagccggtgccgctaccggaagatatgaacgaatggccgacggtggatatcttcgtgccgacctacaacgaagatctcagcgtggtgaaaaataccatctacgcttcgcagggtatcgactggccgaaggataagctcaatatctggatccttgatgacggcgggcgcgaagagtttcgccagttcgcaaaagatgtcggcgtacattacatcgcgcgtaccagccacgaacatgccaaggccggtaatatcaacaatgcgctgaagtatgcgaaaggcgagttcgtctctattttcgactgtgaccacgtgcccacccgctcgttcctgcagatgaccatgggctggttcctgaaggataaaaagctggcgatgatgcagacgccgcaccactttttctcgccggatccgttcgaacgcaacctgggccgttttcgtaaaacgccaaatgaagggacgctgttttacggcctggtgcaggacggcaacgacatgtgggatgcgacctttttctgcggttcctgcgcggtaattcgccgcggcccgctggatgaaatcggcggtatcgccgttgaaacggtcaccgaggatgctcacacttcactgcgcctgcatcgtcgtggccatacctccgcctatatgcgcatcccgcaggcggcggggctggcgacggaaagtttgtcggcgcatatcggccagcgtattcgctgggcgcgcgggatggtgcagattttccgtctcgataaccccttattcggtaaagggttgaagctggcgcagcgtatctgctacgtcaacgcgatgttgcactttttgtccggtataccgcggcttatcttcctcaccgcgccgctggccttcctgctactgcacgcctatatcatctatgcgccggcgctgatgatcgccttgttcgtgctgccgcatatgattcatgccagcctgaccaactcgaagatccagggcaagtaccgccactctttctggagtgaaatctacgaaacggtgttggcctggtatatcgcgccgccgaccttcgtcgcgctgattaacccgcataaaggcaagtttaacgtcaccgccaaaggcggactggtgaaggatgagtatgtcgattgggttatctcccgcccctatatttatctggtgttgctcaatctggtgggcgtggcggtcggcatctggcgctttatgtacgggcccgagaacgaaattttgaccgtctgggtcagtatcatctgggtgttttataacttaatcatcctcggcggcgccgtggcggtgtcggtggagagcaaacaggtgcggcgttcgcaccgcgtagagatgtcgatgccggcggcgattgcccgcccggatggccacctgttctcctgtaccgttcatgactactcggacggcggcctggggataaaaattcacggtgaagcgcgggtactggaagggcaacacgtgaatctgctgctcaaacgcggacagcaagaatatgacttcccggtacgcgtcgcgcgggtgaacggcggcgaagtcggtctgcaattgctgccgctgacaaaccagcaacatattgattttgtgcagtgtacgtttgcccgcgctgatacgtgggcgctttggcaggatagcttcccggaagataagccgatggaaagcctgctggatatcctcaagctggggttccgtggatatcgtcacctggcggagttctcgccgccgtcggtgaaggttattttccgctcgctcacctcgctggtggcctggattgtatcgtttttaccgcgccgtcccgaacgcgccgcggcggtgctttcggcagaaccggcaatggctcaacaatgatgataatgcgatgaaaagaaaactttccttgatttgtgcagtggcggtgggaatgagcagttggtaccccttcgcaacattttcggctccggcgacgtcgccggaggccgtggttgccggagttccagcgacagcgggagctgttcagccagcgccggtcgttaacgatggccagccaacggcgacggttatcgattctgccgccgcgccggtggtggtggcggacaacattccctctcgcgatgtgaagctgacttttgcgcaaatcgcgccgccgccggggagcatggtgctgcgcggttcgcatcctgagggcgccgtagagttcggtatgcgcagcgatgaggtggtcgccaaagcgctgctcaatcttgactacacgccgtcgccatcgctgctgccggtgcagtctcaactgaaggtttatcttaacgacgagctgatgggcgtactgccggtcaccaaagagcaactgggtaaaaaagtgagcgcccagatccccgtcgatccgctgtatatcaccgattttaaccgcgtgcggctggagttcgtcggccactatcgcgacgtttgcgaaaacccggcgagcagtacgttgtggcttgatatcggtcgtgagagctcgctggatttaacctatcagtcgctgcaggtccgtaacgatctctcccacttcccggtgccgttctacgactcgcgcgacaaccgtccgctgacgttgccgatggtttttgctgctgcgcctgacgtcatacaacagcaggcggcggcgattgtcgcctcctggtttggcagcaaggctggctggcgcggccagcagttcccggtccacttcaatgagataccggaacgtaacgctatcatcttcgcgaccaacgataagcgtccggacttcctgcgcgaccatccgccggtgaaagcgccgactatcgaaatggtcaaccatccgagcaacccgtacgtcaagctgctggtgatcttcggtcgcaacgatcaagacctgctgttggcggccaagggcattgcccaggggaatattttgttccgcggcgatagtgtcgtcgtggatggcgtgaaagagttgaaggcccgccagccctatgacgcgccgaactgggttcgtaccgacaggccggtgactttcggcgagctgaaaacctatgaacagcaactgcaatcaagcggcctggtgccagattcgattaacgtggcgctgaatctgccgccggatctgtatctgctgcgcgctaacggcatcgatatggacctgaagtatcgctataccatgccgccgatcaaagatagctcgcggatggatatcagcctaaacgatcagttcctgcagtcgttcagcctcaatagctcgcaggatgtgaataagctgattttacgcctaccggtgctgcaggggttactggacggccagaaccaggtgaccatacccgcgctgcgcctgggcgcgatgaaccagctgcgcttcgatttccagtacatgaacccgatgcccggcggcaacatcgataactgcattaccttccagccggtgcagaatcacgtggtcatcggcgatgactccaccatcgatttttcgaagtattaccacttcctggcgatgccggatctgcgcgtcttcgccaacgccggtttcccgtatacccgcatggccgatctctctcagacgctgatcgtggtgccgaaaacgcctgatgcgggccaggtggagacgctactgcaggcggtaggtggcatcggcgcgcagagcgggctggcggctatcaacttgcagatgaccgatgacggtaaccagattaagggcaaagatgccgacctgatgctgattggcgctattccgccatcgctgaaagacgacagcaaaatcaatctgctggttgaggcgaccaaaagctgggtgaaaacgccgatgcgtcactatgacctggccagcatctacccggacgatgacgcccgcacgccgcatacgcgaaccgacatcacctcttccgggccaatggcggcgattatcggcttccagtcgccatacaacgaccagcgcagcgtgatcgccctgatggccgatagcccacgcggcaacgagctgcttacaaacgccttaaatgacagcggcaaacgggcggcgatgttcggttcggtggcggtgattcgcgaatccggcgtcaatagcctgcgggttggcgatatctattatgtcggccatctgccgtggttcgagcgcatctggtttgcgctctccagccatccgatactgttggcgattctggcggccgtcagcattgtgctgctggcgtgggtgctgtggcgcatgctgcgtattctcagccgtcgccgtcttgatcctgatgatgagtaattgctgatgaacgcatttcgtggggtacttctctcggtattgatgctggcggcggggcaggttagcgccgcctgccagtggcccgcctgggagcagtttaaaaaagcgtatgtcagcgccgaagggcgggtcatcgaccccagcgatgcgcgcaaaatcaccacctccgaagggcaaagctacgcgctgttcttcgctctcgcggccaacgatcgccagggcttcgataagctgttccagtggacgcagaacaacctggcgcagggcgatctgcgcgcccatctgccgggatggctatgggggaaaaagagcgaggatgaatggacggtgctggacagcaattcagctgcggattctgatttgtggattgcctgggcgctgctggaagccggacgcctgtggaaggttgataactatactgaggtaggaaaagcgctgctggcgcggattgccgatgaagaagtcgctgatgttccggggctcgggccgtcggtactgccggggaaagttggtttcgcggacgacaagggctggcgctttaatccaagttatctgccgccgcagctcgccacctactttacccgctttggcgcgccgtggccgaagatccgcgacagcaatctgcgactgctgctggaaacggcgccaaaaggcttctcgccggactgggtgcgctatgagaaaggtagcggctggcagttgaaaaccgataaaccgattattggcagctatgacgctatccgcgtctatctgtgggtcggaatgctcaataacgccgataaacaaaaagcgccgctgttggcgcgtttcaaaccgatggcggttcagacgatcaaacagggattaccgccggaaaaaaccaatatcgccagcgggaaaacgactggcgaggggccggttggcttctccgcagccatgctgccgtttttacaagatgacgacgcccgcgcgctacaacgccaacgggtcgccgatcattatcccgacgcggacgcctactacagcgcggtgctgacgctgttcggccaggggtgggatcaacatcgttttcgtttcgccgcgggtggcgaattacaacctgactggaaccaggcatgcgcaagttctcactaagcttcatcacgctgtctgtcggccttggcctgttgccgctagcgcaggcggagaatacccctgcgcagcagcatctgctggaacaagtgcgtctcggcgaggccagcagtcgtgaggacctggtgcgtcagtcactttataggctggaactgatcgacccgaataaccctgattatcttgccgcgcggacgcgctatctgctgcgccagggcgacaccgccggcgcgcaaaagcaactcgatctgctggcaaagctggccccggaatcgtcggcgctacaagcgacgcgcaacgagatgaagatcagtaccggtagcggtcgccaggcgttgcagcaggcgcgattgctcggcgttgccgggaaggtcgatgaagccgtcgccgcctatgaaaagctcttcggcggcgtcccaacagataccgaagccgctatcgaatactggacgctggtggcgcgattgcccgctcgccatagcgaaggcgtcagccagctgaaaaaactcaatgccagtactccggataacgtcacgctattgacctcgctggcgaagcagatgttttcagataacaagccgcaggagggcttcgcctatctggaacagatggcgcgttcggcctcaggccgcggaattgcggctgatatgtggctcggcgaaattaaaagtatgccggtcagcagaggcagcgttcaggcactacagcgattcctgctccagttccccgccggttccgctgccgctaacgcccgggtgttgctggcgcagcagcaaactcaactgcaagacccagccttcctcgccaaaagcgaagggctggcggcggtgaaatccgggaatgcggcgcaggcggtggccgatctgcagcaggcggtacgcgccgatgcccgcgatagcgatgccgtcggcgcgctgggcgccgcctactcacagcgcggcgatcgggcgcgggcggtggcgcagcttaataaagcgatcgcgatggatccgaaaagcccgaatcgcgataagtgggacagtttgctgaagaccaaccgctattggttgttgattaaacagggcgataacgcgctgaaagcaggccaactggcgcaggcgcaaaatgcgtacgcccaggcgcagcgggtggataacaccgacagctacgcggttctggggttaggcgatgtcgccgcggcgcgcaaagatgacgccgccgccgaacgctactatcgccaggcgttacgcatggatcgcgacaataatctcgccgtacgcggtctggcgaatgtttatcgtcgtgaatcgccggaaaaagccagcgcctatattgccagcctccccgccagccagcggcgcagtattgatgatatcgaacgcagtcttaccaacgatcggctggaaaaacaggccgaagcgctggaaagccagggcagctgggcgcaggccgcggaggtgcagcggcggcgtctggctctggatcctgaaagcgtgtggataacctatcggttggcgaaagatctggtcagcgccggccagcggccggaagcggacgcgctgatgcgtaacatggccaaccgcaagccgggcgatgctgaacgggtttacgcctacggcctctatttgtccggtaataatcaggatgatagggcgctggcgcaaattaacgcgctgccgcgcggacagtggaccgataatattcgtgaactggaagggcgtctgcaaagcgacaaagtgatgcgcgaggccaaccaacttcgcgatagcgggcaggaagcgcaggccattgccttgattaaacagcagccggaatcgatccgctacgatctggcgttggcggattgggcgcagcagcgcggcgatagcgcagaggcgatagcccagtaccatcgggtgctgagccagcaggctgataatggcgatgcgcgtcttggcctggcggaagtctatctcgccgagggcgataaaaacgccgcccgcgcgcaggtcgcgcagttgaaggatgcggatacggaatcgatcaacatgcagcgccgggtagcgctggcccgcgccggatttgacgataccgcgggcgcgcaacaaatatttgaccgcatcgtgccgcaggcgaaaagccagccgccgtcgatggaaagcgcgctggtgctgcgtgatgccgcgcgtttccagacgcaaagcgagcaaccacagcaggccctggaaagctataaagacgcgatggtggccgctggcgtgacccgcgttcgctcgcaggataatgacacttttacccgcctgacccgtaacgatagccaggatgactggctgaaacgcgggatccgcagcgacgccgccaatctttatcgccagcaggatcttaacgttacccttgagcatgactattggggatcgagcggcaccggcggttattcagacctcaaagcgcacactaccatgttgcaggtggacgcgccgttgtatgacgggcggatgttcttccgtaccgatgtggtgaatatgaacgccgggtcgttttccactaatagcgatggcggttattcgccgagttggggaacctgtggtgaaattagctgctatggcggcagtaaaaatcagagcgatggcggcgccagcgtagcggttggctggaagaacgccacctggagcggcgatatcggcaccacgccgatgggctttaacgtggtggatgtcgtggggggactgagttatagcggcgatgccggcccggtcggctataccgtcaacgtccaccggcgacccatttccagctcgttgctctccttcggcgggcaaaaagataatcctaacgacggccataccggcactacctggggcggcgtccgcgccgccggcggcggcatcagcctcagctacgataaaggcgaggctaacggcatctggtcatcgctgggggctgaccaactcaccggcaaaaacgtcgaggacaactggcgcgtacgctggatgaccggttactactataaagcgatcaatgaaaataatcgccgggtgaccgtcggcctgaccaatatgatctggcactacgacaaagacctcagcggttacacgctgggccagggcggttactacagcccgcaggagtatctctccttctcggtgccggtcatctggcgtcagcgtaccgaaaactggtcgtgggaactcggcgggtcggtgtcgtggtcccattcgcgtacgcaaactcatgcgcgctatccgttgctgaatttgattccttcacagtatcgctacgatgccagccagcaaaaagaagagggcggcagcagccagggcttcggttataccgcaagggctctggtggaacggcgagtcaccggcaactggtttgtcggcgcggctgtggatattcagcaggctaaagattacaccccgagccatgcgctgttgtacgtgcgctattctgcttccggctggcagggcgacatggatatgccgccgcagccgttggtgccttatgcggattggtagcagattagcctgatttctacggctaatcgccaatccaccgcgctgttcgcgtatactcgccgtacctcgcccgccgctttcgggaagaacccgccttgcgggcgagagcgaaccatttgcgtatataatcagcctgaaaacgaccggtatcgatggatcttgccggatagtcgttcagtttcagtggagaacacagttgcgcgtcagccgctcacttacaattaaacagatggcgatggtcgcgagcgtgtccatggcgtttgtcctggtcttttgctctattttgctgtttcactttgtgcaacagagtcgctataccacggccacgcaattagaaagtatcgcccgttccgttcgcgagcccctgtcggcggcaattttgaaagccgatattccccaagcggaagccattctgggccgcattcagcctgctgggatcgtcagccgggcggatgtggtgctaccaaatcaatttcaggcgctgcggatgcgctttattcccgaacgcccggtgccggtgatgatcacccgcctgtttgaattaccggtgcagatatccctgccgatttactcgcttgaacgcccggcaaatccgcagccgctggcctatctggtgctgcaggcggattcctatcgcatgtataaattcgtcatgagcgcgcttgcgacgttggtgactacttacttacttttggtgcttattttgacggtggcgcttacctggtgcattaaccggctgattgttcgcccgctgcgcgccatcgcccgcgagcttaacgatattccgccgcaggagcggctcggacatcagctgagcctgccgcgactgcaccaggatgatgaaatcggcatgctggtgcgttgctacaatcgcaaccagcagtctttgctgcgtcagcatgatgagctatcgctgcaatcgacccgtttcccggtgtctgagctccccaacaaagcctttttgatggcgatgctggagcagaccacaacccgtccacaaccctcggcgctgctggtggtagcctgtgagaccttgcaagatgccgctggcgtcctgaaagagagccagcgcgagatgctgctcctgacgctggttgagaagctgaaagcggttatcccacccaatatggtgctgacgcaggtgagcggttacgatttcgctattttcgcccccggactcagcaagccgtgggaagcggtgtcgttaagtaagcaagtgcttacttctattagcgagcgattgccgctgcacggtgtccagctgcggccctgcgccagtgtcggtatcgcgatgtttaatagcgaactgagcgccgaacagttttatcgtcgggcggtttccgccgcggtgacggcgcggcgcaagggcaaaaatcagatcgagttctttgaccccgagcagatggaaaaagcccagcgtcggttaatggaagagcacgatatcctcaccgcgctcgagaatcagcagttcgccatctggtttcaaccgcaggtggatattgccagcggtgatatttgcggtgcggaagttctgctgcgccagcgacaggccgatggcggttggtcgctgccgtgcgatctgattgagcgtattgaaaactgtgggctgatggtgccggtaggctattgggtgatggaagaagcctgccgccagctggcagcctggcagcagcaggggatcatgctgccgttgtcggtgaatgtctcgttactgcagttgctgcatcctgaccgcggcgttgagctgctggcactcattgaacgctatcgtatcgccccgggcaccctggtgctggaggtgacggaaagctgccgtctcgacgatccgcaggcggtgattgacctgctgcgcccgctgcgcgacgccggcacgcgtattgcgctggatgatttcggcatgggttatgccgggttgcgccagttgcaacatatgaaatcgctgccggttgatatcctgaaaatcgacaaggcgtttattgatatgttgccggatgataccagtatggtcccggcgataattcagctcgcacgcgggctcaagctgcggatcgttgctgagggcgttgaaaaagaagaacagctgaaatggttgcaagcggctggcgtggatgtcgctcagggttacctgtttggttgcgccttgccgctggaaagctttatgcagcgcttcctgcaggccgataaggacgatgcaagtttgtaacatttttatttgtttgtgcgagtcagctcaaatattttaacaattccgttgcaacttcgcgcttacttatttctgaaatgtttccagggtgttatttttaagccacagacacagataacctttcattgtctgtggttattcccaaaggacaccctatgaaactctctctcttcaaaagcctctatgtccaggttttatcggccatagctatcggtattttgctgggccatttctacccggaacttggcgcgcagatgaaaccgttcggcgacgccttcgtaaaactgattaaaatggtcattgctccggttatcttctgtaccgttgtaacagggattgccgggatggaaagcatgaaggccgtcggtcgtaccggtgcggtggcgctactctactttgaagtggtgagtaccattgcgttgattatcggtcttatcatcgtcaacgtagtgcaacccggcgcgggcatgaacgtcgatcccgcgacgctggacgcgcacgcggtggcagtctacgccgagcaggctaaagatcagggtgttgtcgccttcctactcgatattattccgggcagcgtgattggcgctttcgccagcggtaatattctgcaggtgctgatgtttgccgtcctgtttggctttgcgctgcatcgtttaggcagcaaaggccagctgattttcaacgtcattgagagcttctcgcaggtcattttcggcatcattaacatgattatgcgtctggcgccgatcggcgctttcggggccatggccttcaccatcggtaaatacggcgtcggtaccctggtacagctgggccaactgattatctgcttctacatcacctgtatcctgttcgtggtgctggtactgggctctatcgcgcgggccactggatttagtatcttcaaattcattcgctatatccgcgaagagctgctgattgtactggggacctcttcgtccgaatccgcgctgccgcgaatgctggataagatggagaagttgggttgccgtaaatcagtggtggggctggtgataccgaccggctactcctttaacctcgatggcacctccatctacctgacgatggctgcggtgttcatcgcccaggccaccaatagccatatggatatcttccatcagatcaccctgctggtggtgctgctgctctcttcgaaaggggctgcgggcgtcaccgggagcggatttatcgtgctggcggcgaccatctctgcggtagggcatctgccggtggcgggcctggcgctgattctcggtatcgaccgctttatgtccgaagcgcgcgcgttgaccaacctggtgggtaacggcgtggcgaccgtggttgtcgcgaaatgggtgaaagaactcgatgccaaacagctcgatgatgtgttgaataaccgcgttcccgcggacaaatcgcaagaattatcctcgtaattcctcatgttatgcccatggactatgggctcctgcgcaaaattaggtatcattccccttctgggggaatgatacctcatgattattttacgtcttcatgtgacattttcgcctacgcgtggtctaaccgacgtatttgattcaccacctttttcggtaacccggcgatgggttgcctatgtaaccaggaatgttcatcaggggttcacatgcagggcacaaaaattcgactcttaaccggtggtttgctgatgatagcgacggccggttctgtgcaggcagaagcgctccagccggacccggcctggcaacaggggacgttggcgaacggtttttcgtggcaggtactttccacgccgcagcgccctagcgatcgcgtcgaagtccgcctggctgtgaatattggctcgctgagcgaaagcactcagcagagcggcttcagtcatttcattccgcgcctggcgctgacccaaagcggcagcctcccgacgatgcaggcgcgttcgctgtggcagcagagtattgacccgaagcgtcctctgccgccggcgatcgtttcttacgatttcaccttgtttaatctgagtttgccgaacaaccgcaacgacctgctaaaagaagcgttgaactggctggcggacgctaacggtaaattgagtattacccaacaagcggtcaatcatgcgctgcagggcagcgatatggtggcgacctggccgctggatacccaggaaggctggtggcgctatcgcctgaagggctcaacgatgctcggtcacgatccggcggcgccgttgaagcaaccgattgatattaaacagctgaaagaattttatcagaaatggtacaccccggatgcgatgacgctgattgttgtcggtaacgtcgatagccgcagcgtcgctgagcagatcaacaaaatcttcggcgaactaaaaggtaaacgcgagaccccggcggcggtaccaacgctatcgcctctgccggctgtaccggtcagcatcatgaccgatgccgtgcgtcaggataagctgtcgatcatgtgggattctccatggcagccaatccgcgattccgccgcgctgcagcgctactggcgcgatgacctggctcgggaagcgctgttctggcacgtgcagcagaacctgagcaaaagcaacgtaaaagacatcggtctcggttttgattgccgcgtgctgtaccagcgcgctcagtgtgcgatcaatatcgactcgccgggcgaacgcctgaacgccaacctgagcgcggtatcgcgcgaactggcgaaggtacgcgacaatggtctgccacaggaagagttcgatgcactgattgcgcaaaagaatctcgaactgcaaaaactgttcgccacctatgcccgcacggataccgatatcctgattagccaacgtatgcgttcgctgcaaaatcaggtggtggatatcgcgccggagcagtatcagaaactgcgccaggagttcctgaactcactgacggtcgacatgttgaaccaatatctgcgccagcagctgtcgcaggatatggcgctggtattgcagcagccgaaaggcgagccggagtacaacatgaaagatctgaaagcgacatgggaaaagctgatggcgccagcacccgctgcggcggtgagcgcgacgccggatacggttgatgcgcataacgaggcgacggatattccccctgggcagtaacacaggcagcgggcgcggagccgcttttgcgccggatgacggctactccttatccggcctacggttcgtacgacttgcctttaatttatagccggtgttggtggcctcaaaatccccggtggcgctaccgcttaccggggctacagcactgtacgatttggtagccctgctaagcgcagcgcaagcagggggaatagggttttagtccggcatcgcttcgcgcgggataatcgccccgcgatattggataaccgtgctggcggtgagatgtccgcgtttcgccgcggattccgcgtcgccgccggtcaggcgcaccgccagatagccggcgctgaacgaatcgcccgccgccgtggtatccactactttctctttcggcagcttcaccgcgggcacctccagcagcggctggccggcgatcgccaccaggcaggagtcggcgccgcgcttcaccaccacctcttcaacgccagcggcgtgggtgcgggcgataacttcggcaaccggtaccgctccccacagcgcatcttcatcatccagcgtcagaaaagcgatatcggtacattccagcatttgctggtacacctggcgagtctcttgctggctggcccacaggcgcggacggtagttgttatcgaaaatcactttcccgccgttggcgcggcattcgcgtagcagggtgagcaacttttcccggctggccgggctgaggatggcgaggctgatgccgctcagatagaggtaatcaaaggtagccagctcttcgcagatggcgcctgcgcgctcgctttcgagccagaatttggccgccgcttcgttgcgccaatagtagaaggttcgctcgccggtctcgtccgtttcaatgtagtaaaggccaggcagccggtcagccatgcgctgaatcagatcggtttttacctgttcgccctgccaggactccagcatctgctggctgaaggtgtcggtgcccagcgcggtcacgtagtgtacgcttagggcatccgcgctggtctggcgcgcgatgtagacggatgtgtttaaggtatcgccgccgaaaccgcgattcaccgccgcgtttttctctgacagttcaatcatgcattcgccaatcacggcaattttcttagacatagtgctgacctgaaattgaatcgaaattaacggtagtttgcgctgggcacccggcagggtcaaccatattaaaacatcgttccattattttttgacctgacgcgcaaaatgtgacgaaaagcgcatttggcggatgaatccgcgctcttcaactatagtgaggagtgacgagacgcaaaaggagcggagaggggatgaccagaacccgtaaaacgattgctattatctcgggaacgattgtgctgttaatcgttctttttttcatcgtgttggcgacctttgactggaaccggctcaagccgacgatcaatcagaaagtttccgccgagctcaatcggccattcgccattcgcggcgacctgggcgtagtgtgggagcgacagcctgaggagcgcggctggcgcagctggatcccgtggccgcatgtgcatgccgaagatatcgtgttgggcaacccgcctgacattccgcaagtgacgatggtacatctgccgcgcgtggaagcgacgctggctccgctggcgctgctgagcaaaacggtctacttgccgtggattaagctcgaacagcccgacgtccggctgataaggctgacggaaaacagcaataactggacctttaaattagcttctgacccggcatccgaaaaagccaacccgccatcggcctggtctttccgccttgataatattctcttcgatcgcggcaacatcggcattgacgataaggtaacccgcagcgatatcgcgatcgtggtcgatccgcttggcaaagcgctgccgtttagcgaagtcaccggtgcgggcaacaaagcgcaggcgacaaaagccggcgattatatctttggcctgtcggtgaaggggcgctacaaaggccagccgctgagcggcagcggcaaaattggcggcatgctggcgctacgtagcgatagtaccccgttcccgctacaaggcgattttcactctggtaatacccggatagcgtttagcggcacggtcagcgatccgcttaatgtcggcgggctcgatctgcggctgaaattcgccggcgactcgttgcgcgacctctacgacctgaccggcgttctgctgccggaaacgccgtccttttccaccgatggccgcctgcgcgccgactttaaacataaaaacggcatgcgttttgactatcgcgattttaacggccggattggcgacagcgatatccacggttcgttgacctataccaccggcaaaccgcgaccgaagctcaccggcgatctggagtctaaacagctgcggctggcggacctcggcccgctgattggcgttgattccggcggcggggcgaagcaatcctcatcacgtaaagcgggagatgccgtacagccagcgggaaaagtcctgccggccgatcgctttgagacggataaatggcaggtgatggacgccgatgtgcgcttcaaggggcggcgaatcgaacacggcggtactctgcccatcagcgacctggcgacccacattattcttgaacgcggcgacctgcgtctgcaaccggtgcgctttggcctggccaacggttcgattgccggcagcgtgcatctgcagggcgataaaaaaccgctacagggcgaagccaatttgcaggcgcggcggctcaagcttaaggcgctgatgccgaacgttgaaatgatgcagaaaacgctcggtgagatgagcggcgatgtacaactgcgcggcagcggtaattcggtggcggcgctgcttggcaacagcaacggcaaccttaagctgctgatgaatgatggtctgattagccgcaacctgatggaaatcctcggcttaaacgtcggtaactttatcattgggcagattttcggcgacgaggaggttcgggtgaactgcgcggcggccaatatcgatgtggtcaacggcgtggcgcgaccgcaaattttcgccttcgatactgagaacgcgctgattaacattaccggcaccgccagctttgcctctgaacagctggatctgaccgttgacccggaaagtaagggcttgcgggtgattactctgcgttctccgctgtacgtgcgcgggacgtttaaatcaccggatgccggggtgaaagccgggccgctgattgctcgcggcgcggtggcggcagcgttggcgacgctggtcacgccggcggccgctttactggcgctgatctcgccggcggaaggcgaggcgaatcagtgccggacgattttatcgcagatgaaaaagtaaggatgagatgagcgatggccctgacggcaacagcgtcagggcctgcaatttacagcgattgatggcgggtttcgtgggtcaacagcaaagcgatcagcgtcagcgccgccatcgccgccaggtagataccgacagccgccaggccgtaattgccctgcagccaggcggcaatatatggtgcgaccgacgcgccgaggattgacgacacgttataggagaaagaggcgccggtataacgtacttccgtcgggaacagctccggcagcagcgcgcccatcgggccgaaggtcaaccccatcaggctaaggcccagcagcaggaaggcgaagaccagaatcgggttgccggaaccgagcaacggtttaaaagcgaacagcgcgaacagaataatcatcgtggtgatgataatcatgcttttacgacggccaaaggcatccgccagcaggcccgccaccggcaccatcacgccgaaaccgatgaccgccatcatcagcatccacagcacttcgttacgcggcaaacctaagccaatcggcgcggcagcggtactgaaggtcatggagtaaacggtcatgatatagaacagggtataggtcgccagcatgatgaaggtgccgagcacggtcacgcgcacgtgcttagtcagcagcgtgccaagcggaattttgacctgttttttcgccgccgccaccttagcgaacaccggggtttcatgcagcgacacgcgaacatacagaccgataatgaccagtaccgcggagaagatgaacggcacgcgccagccccattccataaactgctggtcgctcaacagccacgacagcaacaggaaggtgccgttggcgaagaagaagccgattggcgcccccagctgcgggaaggagccatatagcgcacgtttgcgcggcggagcgttttccgtcgccagcagggccgccccgccccattcgccaccaaggccgagaccctgaccaaagcgcgccagcgccagcagcatcggcgccaggatgccaatgctttcatagcccggcagcaggccgatgaccacggtggagatgcccatagtcagcagcgaggcgacgagtgtgactttacggcctacgcggtcgccaaagtggccgaatagcgctgagccaatcgggcgcgcgacaaaggcgatggcgaacgtcgccagcgactggagcgtcgcggcggcggcatcaccctgtgggaaaaagatatgggggaagacgataaccgcggcggtggcgtaaatatagaagtcgaagaactcaatggcggtgccgatgagtgaggcgacgacgactttattacgcgagttaaccggcgtggcgtcttgcgcgttgtcgatagtagtggctgtggcttgcatagatctttcttatttttgagcgaacgaaaagccatatagccacagcaaaagagacatttcaatctgtaacaaaactcgctatcgcgcaaaaaacaggcaaaaagcggataattttcgccctgagaaaatatcttctatgaaatgcttcacataattaaaatattagagaataaaaccagttttaggttaaataaaagttacgcactggatttatctgctgaaatgataggtcgggctgaattttgcgtctttattcagcccgataatgactttaatcgtgggttttgcccggcatccgcttatcgtctttgtactccgcggtcgcaatccatgcggcgcagaagagggtcagacgggcgaagaagtagaagaaggccatcagccccagtacggaaccaaaggcggcgccggatggggatttcaccagcgccggcagcgtccaggtcatcacgattttaataatctcgaagccaatcgccgcaattagcgtaccgcggaacagcgctttgcggcgtggacggtggcgtggcagtcgccagaagatccagaaaaacagtagatagttcgcgaagatggaaatcgccaggccaatcaggcgccatgcgggtttcagccattctatataatcgagatacagcgcggagatgatcatctgctgtgcggatccggcaacggaggtaatcgacagcgtgataaccagcgcgaccagcaggccaatcagcgagatcagatcgcggaagtattttacccagattttttcctgatcctgcggcgtacgttcccacacgtcgcgcgactgggcgcgaatcgcttcacgcaggttgcccatccagttaataccggagtagagcgcgaccaacaggccgaccagcccgacggcggtacgctgctgtacggcggtgttgatggtgtttttaagcgttgccgccagcgtcgggtcgctgacgttttgcagaattttatcgaagatgtcctgcagcagcgtcggatgccaggccagtacgaaaccagcggcggcaaatgagaccatcagaatggggatcatcgacaaaaatgagaagtaggtgatggctgcgccaaactgattgccaagcctgtcattgaaccgctcggcggcgcgcagcaggtgggctattaccggattgcgctgaactttggccgccgttccggtgaccgttttcagcgcctggttagctttctgcccaacggcggaatcgttgatggcggcgagcgtacttttgtttttctccggctgctggcccgtttcctgtggcggttggcgatcgtcgttttccggcgtcataagtgatttcttcctttctttacagcgatattcagccaaaagtataccttaaacgacgcatcttgcaggcgcccatcggcccgacgggcgttgacgacccgcgccgattaatcgacataacctttcatcaatccgcccagccactccataaagagatgcacgcggcgggagagattgcgccgatgtggatagataatcgacaccggcatcggttcggcgcggtactgcggcaggatctcaaccagctcgccggtacgcagcggttcacgtacggcaatgcgcgggacctgaataatgccgagcccggcctggcaggccgcctgataggtttcggtgctattgacggtcaacacgccgccggttttcacccagcgcacggcgccatcgctgacgacttcaaagcctgactgccgcgcgccgaagttgctggcgtagtggatcagtgcatgatccgccagatcgtcgaggctttccgggtagccgaagcgcgccagataatgcggactggcgcagttaatttgcgtgagtttgccgagcgggcgggcgatgagtcccgagtctttaagcgtacccacccggatcacgcagtcgaagccttcgcgcaccacatcgaccagccggtcgctactgctcagttcgatttcaatgccgggatactgttgtaaaaacgcgggaagtttcgggatgaccagttttttggcgacgctgatcggcatatcgacacgcaggcggccgctaatgcttgacggatcgccctgaaacataccatccagttcttcgagattacttaacaggtctttggcgcgttcgtaatagaccatgccgtcctgcgtcaactgcacccggcgggtggtgcggtgcagcaggcgagcgccgagatggctctccagcgcctggatctgtcgcgatacgctacctttgggcaacccaagggtatcggcggcgcgagagaaactctccagttccgcgacacgaataaagagttgcattgcgtgaattttatccatgcttactgcctattgttgttaataatgaaacagtaaaacgtaatttagcccatttattgttactacgtctgctaataagctctttattcacacacacgtaatgacgaaggggtttctgatgacacaacgtatcgctttagtaaccggcggcagccgcggtctgggaaaaaacgcggcgctgaagctggcggcgaagggaaccgatattattctgacttaccacagcaaccagcaggcggcgcgggaagtggtgcgcgaaattgagcaaacaggagcgaaagcggcagcattgccgctgaacgtcggcgataccgccagttttgcaggctttgtacaacagctgacgcaatgtctgaaggagaagtggcagcgcgacagcttcgattatttattgaacaatgccggcatcgggttgaccgcgccgtttagcgagaccagcgaagggcagtttgacgagttgatgaacatccactttaagggaccgttcttccttacccagcagctgctgcctttgcttaaagacggtgggcgcattctgaacgtctccagcgggctggcgcgttttgcactcccgggctattccgcttatgcggcgatgaaaggcgccatggaggtgttaacccgttatcaggcgaaggagctcggcgctcgcgggatatcggttaatatcatcgcccccggcgcaattgaaaccgactttggcggcggcgcagtgcgcgataatgccccgcttaaccagcatattgccgcccagacggcgctggggcgcgtcggcctgccggatgatatcggcgatgctatcgccgcgttgctgagtgacgagcttggctggatgaacgcccagcgcgttgaggtttccggcggcatgtttttataatgatcacgccctgcgcataatagcgtagggcgccttcatattgtgctttttattattccgtaacactcttttgcatcatgcgtatcgctgatttccagcgactcgattacactggaagaaataatattattatcctgttatctatccgcttaattaaggaattcctcacatcaaatgtaataaatattatgaatgagtaatcgttccgcgctggcgtgtaactattcatcatcatgatgtttatatcatctcctccatcggtaaaatggcttaggtcatacggcgagttcttatttttgtcggctgatattacccttcacccacttttaaaaggggtattttcgatggagagcagtccatgcaagtaatcatgtttgacaggcagtcaatatttattcatggaatgaaggtcggcttacaacaacgtattcctgaaattaatattcatagcacctgtcaggcagaacagctgtggcaactgctcacggctcatccgcaggcgctcctcatgcttgatggcgacctgaatagtgaattttgttgctggttgctccaggagaagcagcagcgttttccgcatgccaaagtattattagtggtttcggatgataataaaagctggctgcaacgggcgctggcgtggaacgtgcgcgccattgcccaacgtgaggatagcgccgatatgtttgcccagatcattaatagcatcatgttgggcatgatgtgtctgcctggcacatggttaatgacttcggcggatcgcgggaaacacgctgtacatttaagtcgtcgccagcaggaaattttaaaactgctggcggaaggcagctctaataaggaaattagccgtacgttaaatatcagcgccgggaccgtgaaagcgcatcttgagtcgttatatcggcggctggatgtgaaaaatcggacccaggcggcgatggcatttaatagcgtcggtgaaaattaactggtctgagaaaaccactcgcactcctgcaggcggaaggcgttatcgcggtcaattttccgccatatcgccagcgcctgcgttatgttgtggctgttaagtgaacgcaaaatagcctccaactccggttgggcgctgccatctaaactgaataccagcgccagcagggcatcgtactgcggctgagtcagttccacgaccaacctgcgctgtagaatctgttggcactgcagcaggtctaccgtcaatagcatcatcgccagttcagcggtgatgggcgtctctttctcatcttcatcaatagcgtggccatagccgacccgccattggccaaactggtcctgatatggcagtagcgccagcccttgcgtttgctgaataaatcgcagtcccggcaggcttaacgtggtgatagtcatggtcttttcctctattgttggcggcagtgtagaggaaaagcggggtcgcccccattcgccggatggcccagggccttattggtaatcgtggcgcatcaggccaaacagccagtcattgtgccaacggccatgtagccagtagctctcgcgtagctctccttcctgtataaatcctgtttttagcagcagctgttttgaggcctggtttccggcggtgacgctggcggtaagacgacgaatgccgcctgtagaaaatgcgtaatcacatagcgcgcgcagggattcatatccgtagcctagcccctgcgcctgtggggcgaagagaaagcccacttcggcgatatcatcatcgtgatggcaatagccggtcaggccaaggggcgtatggctttgccgatcgcgaaccaccaggcatagccagtgcgaggacttaggcgaccagagcggcaggcgtgcatcaaacgcggcgcggatatcggcgatgggccggttatccgcaacatagagcatcacctgcggatcctgttgcaggctgagaaaaaaagaccagtcgtcaagctgcagcggcgagcagcgcagccgcggcgtaagcagttcgggcatgttgtcggctctggcaaagggaaaataaaaccttagcagcacagcctgccgacggaaagtgccttacgaagacctcggctcgccgtacaggctgataagccgccgcaccacgccgttggtccagccgaagccatcctgcagcggatattccccgccgccgccctcatgtggtacgccgctggcgatatgatatttctcaatcagcttgtggtgtttgagataaaattgattcaccgtctgcagccagctctgggcgatttcatcgccaagcgggtcgtggccgtacattttgaatccctgtaccgccatccactgcagcggcgcccagccgttgggtttatcccactgttcgccgctttcatattccgtcgccatgatgccgccaggggtgagcagacgcgcgcgtacggcatccgccagccgttcggcctgggcgtgggtcgccatcccgacatacagcgtgacgatgctggcggcggagaataaggccaactgctcacggcgccaatcgtaatcacgaaaacagccgcactcttcatcccacaggtagcgggtaaccgcctcccggcgagcgttagctttacggcgaaattcggcttcagcctcgcgatcgcccttcaggccggaaagattggcgatggtattttccagcttaaacagaaaagcgttgaggtcgatgggaataaactgggtggtgcggatactcgcaagcctggtgatatcgcgcagccagcggctggagtagtcccagccggaagccgcgccggcgcgcaggtcgcgatagacctcgttcggcgggcgaccggaatgcttcgcggtttctacatcttctcgccaggattcatcgcgcggcgtatcgcgatcgtcccagtagcggttaagcagcgaaccatcgggcatacgcaccacgtgacggtaggcctggttagggatcagcgattccgcgccgtccatccagaaggcgtgctctaatttgagatggtcgagatagcggcgcgcgccgcgaacgccatcttcctcaaacagctccaccatcagggcgaataccggcggctgggagcggctgagatagtaggtgcggttgccgttgggaatgtggccgtaggtttcaatcatccaggcgaagttgtcggccatacatttgagcaaatcttcacggccgctttccgccagacccagcatggtgaagtaggaatcccagtagtaggtctcgctaaaacgcccaccggggacgatgtacgactgcggtagcgccagcagcgatgaccacggaatatgatcctgcggttcacgggtgagcaccggccatagcttatcaatatgctcttttagcgtcagtttcgggtcagaggtgtaatcatcggcgtggctatccggtagccagaagttgtcttccacaaactgacgcaaatcgaactccggcgtacgcttaacccgccggtagtgcatcaggatatccaacggatcgtgtttcggcgcgcagtcgggaaaggttttgctatcaagaaaaatgcgcgacttttgtacgttagtaaacaactcgagatagcggtcggcgggggtcagggcgtcagacgccggtagcccttcgatgatctccggctccggttcggcgtcgaacatttcatccagttttaactcatacggatcggcttcgtagcacggatcgttttcgatcctcaactcgtcgtcatcaacgttgcgtagtttctggctgaacatagcgatacaggcctccggatagcgtgagtttaggggccgggcatgcccgggctctctaataagcgtagacactcgcttcggtctgcggaagataaactgtgcgtcaggtcacgcttttcagtgcataaaaatggcaggtaagacgagcaggtctttgaaattaaagggtgaacatttaccgttgtcgtggatgcgcgaaaacgaaattcggagcattcattatgcaacaaaatttgaaccgccccgggtaaacgcaggcggttggctcgtttactcccaggcggcttccagcatctccagcagttgctctgactccagcgtgaccggattggctttcatcgacgatgaactactggccgccagcgcggcgggttccagcgcttcgcgcggtacgccgaggtcgcgtaaattgccgagccctgagcgctggctccattcgcgcaggctttgccaggcgtcatccggcgagacgccaagtccggcggcgatccactggcgcacgtcgaggaaacgctggcgcagcgccggattggttacctgcgactcattgagttccagcccaaaaggcagcaggcagccgcagagcgcgccgtgggaggcatcgcttagcccgccaagcggccccgcaagaccgtgaaccacacccaggccggcattggcgagcgccagcccgccgcacaggctgacccatgccagctcgtcgcggctgtcggcacactctttttccatcagcgtttttaacgcggcgatgccgcgggggatcgcctcccggcacagggcatcggtgaagggcgtcgcccgggtgcacagccagggttcgataacctgagttaaggcatcaaggccggagccgagggtgacggcgcggggggcgttatccgttaacgccggatcgacaatcgccagttgcggcagcatgcgatcgtcgcgcaggctgactttgcgctgctgctgggggacgttgatgaccgcgtttttagtaacctccgcgccggtgccggacgttgtgggaatagcgacaaacggtagcgggctggcttccagtattctccccgttccgacgacttccagatagtcgatggcaggcccgcttgccgggaccagcgcggcaatggctttaccggcatcaatgaccgcgccgccgccgaggctgaccaccgcgccgacgccgcgctcgcgcgccagccgtacgccgcgttcaatatcgtccagcgtgggttcattggcgatagcaacagtgctgacctgaagatgcaatgcggtcagttcgttcagtaaaaattgggcgcgatttttggtcgcgccgtgaaccagcagcaccggggcatcatattgtgccagccacggcgcggcgctgcgggcctgcccgcggccaaagcggatattgccgggcgttaaaatgttgaagggagtgaccatgtgtaagggtacctgtagtggataattattctgcaatccactatacacattatccggcaagcttcatgtctgccatattacgaaaaagggttgcggacgatgataagaatcttgggtaaacgctcgtctattaacgtgcgtaaagtcctctggacctgcgaagaggcgggtatcgagtatcagcaggaagattatggcagcggctatagcccgcttgatacgccggaatttttggcgctgaatccaaatgcgttagtgccggtgctggtggatgacgattttgtcctttgggagtcgaacagcatctgccgctatctggcgcgtaaggtcggacgtgacgatttgctgccctctgagttacgtgccgcggcgcaggtagaacactggatggactggcaggcgacggagtttaacagcgcgtggcgctacgcgttcacggggctggtgcgtaaagatccgcgttttcaggatccggcggcaattaaagagagtattgccgcgtggacgcgctgcgtacagattgtcgacaatcagctacagcgcaccggcgcgtggctgaccggcgagacgtttacgctggcggatatcgtgctggggctttcggttcatcgctggaaaatgacgccgttcgcccatccggagatggcaaacgtcgaacgatggtatatggcccttaaccagcgcccggcatttatgcgccacggcaataacggcgtagcgtagccgctgatttagcgtcgcgggcgggtactgcccctgacgataagcttcccctgcagaacgtgctgaacggcactggtttcagccgcgcctagctgcgttttcagtacggcgatggcggtatccaccatttccgatagcggctggacccaggtggttaaatttatcagcggccagctggccatggcgatatcatcgaacccgacgatggagatatcttcgcccgccttcatgcccatttcgccgacaaccacgttgagggcggcgatggccatcatatcgttggcgcaaaatagcgcgtccggcggcgttggtagcgccatcagcctgcgggtggcgttcatcgcttcttctatcgaccacattccgctatcgcgcagcatcgggcgggcgccgcgggcctccagacgctgtcgaaagcctgtctcacggtcgcggctggtagaggaggtatctctaccggcaacaaatgccagctgctgatggccgagatccagcaggaaatcggcaatcgcggcgccgccagccagattatcgctggtgacgctggaaaccgaccggctgtcgtttttgcggttgagcagcagcaccggcaggccgagctgctggcattcatgagcaaagtgtgaagaaaggctgctggacaccagcactagcgcttcaacacgatgacgcagaatctcttccatgatgggggtagtgtcatcatcgcggtacatcgaaaacaacagtacccggtatcccatcaggttcaacgcctgtgacagttcatccagaaccgcggcgtagaagggattcaccaaccccggaacgacaacaccaataagcgttgagcggcgggtgatcagcgactgggcgataaagctcggacgatagcccagctcggcggcgatcttacgcaccttttctttggtggctggcgaaattttcgctccttcggtaaaggcgcgggataccgcagattgcgagacgccagccgctttcgcgacatcgtaactggtgactgctcgtttgttttgacctgccattccgttgcctctcctgacccatgccccgtcattatgcgtgaatcttcccccctgtcactaattttgcgatctccgttgcattcgaatgcattgctgcttcacataacatttcattcacgccaggatgcaagtgaattcgaatgcattagcatttcattaacatcatagtgaggcaagttatggctatctggctcaagcgcggtgcggaatctgaagcagtgaaatctcacgaccgtacggttcgtgaagcagtagagaaaatcctggcggatattgaagcgcgcggtgacgcagcggtgcgcgagctgtcgattaagttcgataagctcgatcgcgcaaacttccgcctgtcgcagcaggaaatcgatgactgctatgctcagctgtcggatcgcgatattgctgatatccgctttgcgcaggagcaggtgcgtaacttcgctcagcaccagcgcgacagcctgaaagatatcgaggttgaaacgctgccgggcgtcattctgggacacaaaaatattccggtcagcgcggcgggctgctacgtgccgggcgggaaatacccgctgctggcgtcggcgcatatgtcgattatcaccgcgaaagtcgcaggtgtgccgcgcattgtcacctgtgcgccgccgtttaacggtaaaccggcgccggcgattgtggtggcgcagcatatggcgggggccgacgaaatctactgcctggggggtattcaggccgtggcggcgatggccgtcggtaccgagagcatcgcaccggtggatatgctggtggggccgggcaacgcctttgtcgctgaagccaaacgtcagctgtttggccgcgtcggtatcgatctgttcgccgggccgacggagaccctggtcattgccgatgaaagcgtggatggtgaaatctgcgccaccgacctgttaggtcaggctgagcatggtcctgattctccggcgattttgttgacgacctcggaaacgctggcgcgcgaaacgctggcggaaatcgatcgtctgctggcggtgctgcccaccgcggaaatcgcgcgccagtcgtgggcgaagtttggcgaaatcattgtggctgaagaccgggaagaaatgctgaaaatcgccaatgagctggcgttcgaacatgtgcaggtaatgacccgcgacccggactggttcctcgaaaatatgcagaactttggcgcattgttcctgggacctcgtactaacgtggcctacggcgataaagtcatcggcaccaaccataccctgccgacgcgtaaagccgcgcgttataccggggggctgtgggttgggaagttcatcaaaacctgcacctatcaaaaggttcttaccgatagcgcctccgcgcagatcggcgagtactgttcgcgtctgtgcgccctcgaaggtttctccggccatggtgaacaggccaacgtccgcgtgcgccgctacggcaataaagacgttccttacgctgggattcctgaataacccgtaaggtctgaaacgggaagcgggatacgctccccaacttaacatcggccgcccgataacaaggaaataagcggcggccatgctgacggataaccctatggacgtattgattgccttactggcgttaggattgctgatgctcgccgcctatcgcggctatagcgtgatcctttttgcccctttggttgcgctcggcgccgtattactcacccagccagccgccgttgccccggtattcagcgatattttcatggataagctggtcgggttcgtaaaactctatttcccggtatttttactgggcgcggtcttcgggaaattaattgagttttccggattctcccggtcaatcgtgagtgctgttacccggctgatggggcaaaacaaggcgatgccggtgattattctggtctgcgcgttgttaacctatggcggggtttcgctattcgtggtggtatttgcggtctatcccttcgccgctgagatgttccgccagagccaaattccgaaacggctaatgcctgcgactatcgcgctgggcgccttcacttttacgatggatgcgctaccgggttcgccacagattcagaatattattccgactaccttttacggtacgacctcctgggcagcgccctggcttggggtactgggttccgcatttgtggctattggcggctggttatatctggaggcgatgcggcgtaaagcgcagcgcagaggagaaggttatggaagcgagttggtaaatgaacctgaaaccccggcagaccttaacttgccgcacccggtgatcgcgctgctgccgttgattatcgtcggcgtcgccaacctgctgtttacctggcttatccctcaggcgtacggtagccatttcctgattgacctgccgggactgaaagcgccgatggaaagcgacgtgaagaagatggtggcgatttgggcggtgatggcggcgttattgtgcggaattatcactatcttcttgtttgccgggcgtagcctgaagggtaagctggccgacggtagcaaagtcgccgttggcggcgcgatgctggcggcgttgaatactgcatcagagtatggttttggcggggtgattgccgcgctgccgggctttgttcaggtggccgatgcgctaaaagcgatcccaaaccctttactcaatcaggcgattacgatcaatattttgtccgggatcaccggttcatcctccggtggaatgagtattgccctggcggcgatggcggatcgctttgtggagtcggcccatgctgcggggatcccgctggaagtgatgcaccgtgtggcgtcgatggcggcgggcggcatggatacattgccgcacaatggggcgatcatcactttgctggcggtgaccggactgacgcatcgccaggcctataaaccgattctcggcatcacgttgtttaaaatcctcggtgcctttttcattatcggcgtttactacgccaccggactggtataaagcccgggccgtcggctatctgtgccgacggccttatttatttttcagcgtattcgctttgcgccggcggagtaatgccgctacgatccgcgtctttttttatctcatcccaaaaacgcgcggcaggtaggtggagtttgaacaggcggttaggccttgtgctattggcattactgttggtttcaggctgcgccggcacgctgtcgcaaatgagccctcccagcaatgaaaccagcctggtggggcataacgggcggcggctttccgtcgatactttcgtcagccaatacatgcgcgagaagcaggtcagcggcgtggtggtggcgattattcatcacaacggcccggcggagtttcactgcttcggcgtgacggatgataagcagcgctacccgataactccgcaaacgctttttgccctcggttcgttaagtaaaggtgttaccgctgaagtggtgacgatgctggtcaacgaggggcgtttacactggaacgatacgctgcaaaccctgctgccgccggggaccgtgctcagtgaagatgcccgcaagataaccttactgcagctggtcactcatacctccgggctgccgcgtcaggcgatgaacatgctgtcgcttgaacatctgttggcctatctcaacaacggtgaaaacttttatcacgaactcgatgccgacggggtgctgagctatctgagcaacttcaatgcgccgctggagcgcgagccgagttactccaacctgggttttgcgatacttgggtatcttctcaaataccaaaccggcgaatcgattgagacgctggcgtcacggatgatcttccggccattggcgatggggaataccagcttcctgccgcaaacgctgcatgaatatccgtggcgggcgctgggacacgcaggcgatcagccgaagtttaaaccgcgcggcgcgctgacgccggactggcagttcatgaataatatggttggcgcggcgagtctgtacagcgacgccggcgatctgattaactatgcccgcgctcacttcgcccccacggggcaggcagcactggatcaggcgttcaaagacgttagcgtcgattattatccgcggcgggtcgaagcggcgaacattgcctgggtgaccgacacatttggtcggcagcgattaacttatcaggtgggttacatcggcggctactcaagctatatcggcttcgataaagcgaatcagaatgcggtggtggtgctgcaaaacagctttaactggagtaactacatcggccatcagatcctacgtaatctggcgacggagtaaaaattaagccccgtcctgagacggggctgtgcggattaacgcatggtgacaaactcttccgctgcggtcgggtgaatggcgacggtattgtcgaagtcttttttggtggcgcccatcttcagggctaccgcaaagccctgcagcatctcatccattccgaagccgataccgtgaataccgacaatcttctcttccgggccgacgcagaccagcttcatgcggcacggctggcggtgagaggtcacggcggtatacatcgcggtgaaggacgatttgtacaccttcacggcgtcatcgccgtactgctcgcgcgcctgcggctcggttaagccgacggtgccgattggcggatggctgaagaccacggtcgggatattgctgtagtcgaggtgctcttccggcttgttgttaaacaggcgttcggacagacgacggcctgcggccacggcgaccggcgtcagctcgacggcgccggtattatcgcccaccgcgtagatgcccggtacgttggtgttctggaacttatcaacgatgatgtagcctttatcgttggttttaacgcccgttgccgccaggttgaagttatcggtcgccggttcgcggccaatcgcccaaatcaggcaatctacggactggctgcggccatcttccagctccagagtcaggctgccgtcggcattcttgactaccgccttcggaattgcgttcgtgtgcagctgtgggccttcggcgttcatcacttccaccagagtctcaacgatcagcggatcgaagttgcgcagcggcgcgtgtttacgcacgaacaggtgcgtttcggcgccgaggccgttaatcacgccggccagttcaacggcaatatagcccgcgccgactaccgctacgcgcttcggcagcgccggcagttcgaagaaaccgtcggaatcaataccgtattccacacctggaatgttcgggtggctcgggcggccgccggtggcgatcaggatatgatcggcggtaatggtctcgccgttgacttccacggtgtgggcatcgacaaagcgcgcgaaccctttgataacatcaactttattcttacccagcacgttgtcgtaagaggtatgaatacggtcgatataggcgctgcggctggcaaccagcttatcccagtcgaaatggttgatggtggtatcgaaaccgtaatccgggccatacaggtggattgcttcgcggatctgcgccgcatgccacatcacttttttcggcacgcagccgacgttaacgcaggtgccgcccagctctttggcttcaatcagcgcgcacttctggccgtacatcgccgcacggttaatcgaggcgataccgccgctgccgccgccgatggcgaggtaatcataatgtttgctcatgcccatatgtccttaatcgttaattgccgcgattgtagcgcgaggcttaaaaggttccaccgatggttgcgattactccggtacgatccaattcacggtcgcgtgaccggtaccggctggaaccagtttgctgtgcagccacggcagcacgttattcatctgctgttccagcttccacggcgggttgatgacgatcatcccggaggcggtcatgccgcgctggtcgctgtccggacgcaccgccagctcgatttgcagaattttgcggatacctgtggcttctaaatctttgatcatgcgtttgatttgcgcgcgcagcaccaccggataccacagcgcgtaggtgccggtggcgaagcgtttataaccttcgttgatcccggtgaccaccgcctgataatcggttttaatttcgtacggcgggtcgataagaatcagaccgcgacgggaaaccggcggcagcttggccttcagctgctgatagccatcggctttatcgacgcgcgcgcggctgtctttctggaactcggcgcgcagcagcgggaaatcgctcgggtgcagttcggtcatctgcaggctgtcctgctcgcgcagcagttggcgcgcgataagcggcgaacccgggtagtaacgcagttggccgctgcggttgaagtgttcgacgaccgaaatatacggctccagctcggtcggtagatcgtcctgctgccagatacgggcgatgccttcaaggtattcgccggtacgttcggcgtgctcgccgctcagctgatagcggcccgcgccggcgtgagtgtccaggtagagaaacggtttttctttctctttcagcgattcaatgatcaaactctgaacggtgtgtttaaggacgtcggcgtggttgcctgcgtgaaagctgtggcgataactgagcatggatgcagtgattccggaaataaacaagttaaccgacagtttaccgcagttcgcccaggattgccgctgtcgcaccgcctgtcattgaaattcccgcaactatcccccattctagatctcatgcaaaagcgccggaacgcgcgcttcattcaccctcttcaacaggacagcgcatatgaccaatccattactgacgcctttttcattgccgccattttctgcaattaaaccggagcacgtggtccctgcggtcaccaaagcgctggatgattgccgggccgcggtggaaagcgcggtggcgcacggcgcgccgtatagctgggaaaatctttgccagccgctggcggaagtggacgatgtgctgggacgcatcttctcgccaatcagccatttgaattcggtaaaaaacagcccggagctgcgtgaagcctacgaacagacgctgccgctgctctccgagtacagcacctgggtcggccagcatgaaggcctgtataaagcctaccgcgacctgcgcgacggcgataactacgccacgttgaacaccgcgcagaaaaaggcggtcgataacgcgctgcgcgattttgaattatccgggattggcctgccggcagaagcgcagaaacgctacggtgaaatcgccgcgcgcctctctgagcttggcaatctgtacagcaacaacgtgcttgatgccaccatgggctggaacaagctggtgaccgacgtcgccgatctcgcaggcatgccggaaagcgcgctggccgccgctcaggcccaggcgcaggcgaaagagcaggaaggatatctgctgacgctggatattccgagctatctgccggtgatgacctactgcgacaatcaggcgctgcgcgaagagatgtatcgcgcctattccacccgcgcctccgatcagggcccgaacgccgggaaatgggataacagcccggtgatggcggagatcctcgcgctgcgtcacgagctggcgcaactgctgggctttgacagctacgcctttaaatctctggccaccaaaatggctgaaaatccgcagcaggtcctcgatttcctgaccgacctggcaaaacgcgcgcgtccgcagggcgaaaaagagctggctcagctgcgtgctttcgccaaagccgagtttggcgtcgatgaactgcagccgtgggatatcgcttactacagcgaaaaacagaaacagcatctctacagcattagcgatgagcaactgcgcccgtatttcccggaaaacaaagccgttaacggcctgtttgaagtggttaagcgtatttatggcattaccgccaaagagcgtaccgatgtcgatgtgtggcatccggaagtgcgtttcttcgagctgtatgacgaaaataacgagctgcgcggcagcttctatcttgacctgtatgcccgcgaacataaacgcggcggggcgtggatggacgactgcgtcggccagatgcgtaagctggatggttccctgcaaaaaccggtcgcttatctgacctgtaacttcaaccgcccggtaaacggcaaaccggcgctgttcacgcacgatgaagtgattaccctgttccacgagtttggccatggtctgcaccacatgctgacccgcattgatactgctggcgtttccggcatcagtggggtgccgtgggatgcggtcgagctgccgagccagtttatggaaaactggtgctgggagccggaagcgctggcgtttatctccgggcattacgaaaccggtgaaccgctgccgcaggaactgctggagaaaatgctggcggcgaaaaactaccaggcggcgatgtttattctccgccagctggagttcggtctgttcgatttccgtctacacgcggaatactcgccggagcagggggcgaaaatcctcgagaccctggccgagattaaaaagcaggtcgccgtggtgccgggcccaacctggggccgcttcccgcatgcgttcagccacatctttgcgggtggctacgcggcgggctactacagctacctgtgggccgatgtgttggcggcggatgccttctcgcgcttcgaagaagagggaattttcaaccgtgaaaccggtcaatcattcctcgacaatatcctgagccgcggcggttccgaagagccgatggagctgttcaaacgcttccgcgggcgcgagccgcagctggatgcgatgcttgagcattacgggatcaaaggctgattgctacgtgaaaatctgcttaattgatgaaacaggcgccggtgacggcgccttatctgttttggccgcccgttgggggctggagcatgatgctgagaacccgatggcgctggtgctgacggacgagcatctggagctgcgtaagcgcgatgagccaaagcttggcggcatctttgtcgatttcgtcggcggcgcgatggctcatcgccgcaagtttggcggcggccgcggtgaagcggtagccaaagcggtgggtattaaaggcgattatctgccggatgtggttgacgccaccgctggcctggggcgcgatgccttcgtgctggcgtcggtcggctgccgcgtgcggatgcttgagcgtaacccggtggtcgccgcgctgctcgacgatggtttgaaacgtggctatgccgatgcggagatcggcggctggctgcaggagcgcttacagttgattcatgcttccagcctcaatgcgttgaccgatatcaccccgcgcccacaggtggtgtatctggatccgatgtttccccataagcagaaaagcgcgctggtcaaaaaagagatgcgggtatttcagtcgctggtggggccggatttagacgccgatggtctgttggcgccagcgcgtcagctggcgaccaaacgagtggtggtgaagcgtccggactatgcgccgccgctggcggatgtcgccacgccgaacgcggtggtgaccaaaggacatcggtttgatatttacgccggtacgccggcgtaatttttcgccgttgtgatatcacccggatagcggcgcaaagcgccttatccgggctaccaaattgtagcgcgagccgggaaccgcaatatttaaacaaacggcgccagcggatcggccatctcaaacgcggaggtcttatcggccttcggcggataaataagttcgctgacgatcgacaccttcactttttttgcctcttcgcgggtcaatttcacctgctgatcccaaccctcggtgtaaaccgcgccccaggcgccgagatccagacaggtaacgtaggtttcctgacgatagtgcagtggcgcgacgcccagcaggccggcggcggcgttattaccggcgaatttaccgagcaggatagcgtgctggcaagtcatcagggcgtgattacccttatcatcagtcgcggcataggccacgtcgccggtcgcgtagatatcatcgtaacccatcacttgcagttcggcgttgacatgcagacgcccttgacggtcgcgcggcgcgtcgatttgcgctgttagattattcgcctggacgccgacggtccaaatcacggtctgcgagtcgatacgctgtccgtctttcagtttcacgccagcggcatcgacgctcgccacttcagcattaacaagccactcgacgcccagttcttttgaggcctgaacgatgacttcacgcagcgcatcgctgtatcgagagcccggctgcggaccgcgttcaactacgactactctggtcttagcatttgagccgaagatcgcgcgcagcttggtcggtaattccatcgccatctcgataccggtaaagccgccgccgcagactaccacggtgttgcgcgcatcgctttgcggacgctgtgctaaagcaattaagtggttttccagcgtcgtagcgctttcgagctgatcgagatcgaaagcgtgctgtgccgcgcccgtgaccatcgcacggttaacatggctaccgctcgccaggactaaacgatcccagttctgagtgtggctttcgccgttgctaccggtccaggttaccgttttatccgcaggatggatctgcgacacgctgccgcgaagaaaacggatcccggtagcatcgaacagcggctgtagcggcgcaaccagcgacggtacgtcgctttcgtagaaacgaggacgaacgcgcagctcaggctgcggcgcaatgactgtgatatcaatggcctgctgttgatttttttccgctaaacgcgcggcgctcaaggccgcccacatcccggcaaaaccggcgcctacgatcaggatttgtttacgcatcttttttcactcgctgttaactacgattcatttactcggattttattggtcgtagttaagaaaagcaacgcctctcacgcgatcctgaggatcctttattggggtttttctttaatatactgataagtaataaattaaattattctcttgcgaggtgagatatcagatatctggaatgaggcggtgggaaaagctacaataactcagattaatattggctgagataagtgaatggcattttacagttccggagttgagtacggcatccatagcctgatgtgtatggtggacagcaaaggcgacgcccgcgatatgagcgtgcgcgaaatcgctgagctgcaaaacgtgccctacgattatctggccaagatttttacccgcctatcgaaagcgggcctggtgcgtagtattgaaggcaaaggcggcggctttcagcttgccagagcggctgagcacatcaccgtgttggatgttgccaacgctattgatggcgaaaagcgtattttcgagtgccgtgagatccgccagcgtcttgcggtgtttgatgagcagccgccgcagtgggcctgcgaaggtatttgcggtgtgcgcgcggtcatggatatggcgcagcagcgaatggaagaggcgttaggccagcatactatcctcgatctggcgcgcaagatgtaccgtaaagcgccggatgagtttgtgattgaagtgcaggagtggatcgcggcgcgtaagaactaggctgcgcgccccggcggttgtcgccggggcggctaacgggttactcggcgctggtcggggtattaatcatccggttcagccacggcaccataaaggccatcaccaccgtcaccgccagggtcacgagaccaattttactaaacacgttggtgtagatcggcagcgtctgcagcgggtcggttatattttctggtaccgcggtgaaggtcgcgacatagccgcccatcaggaacgcggcggcctgagtcaggaaccacatccccagaataaagcccatcagccgctgcggaaccagcgcggcaaccatcgccaggcccagggcgctaatcagcagttcgccgagactctggaacagataaaccagcacgataaaccatggcgaggtgagcccctgcgggtcggcaaaccacatcccggccgccgcggcggtcaggaagcccagcgcgcagaggaacatgccgagagtgaatttcatcggcatggtcaggtctttacctttgttgccaagacgggtgtagatagccgccagtaccgggctggcgaccactacccagaacgggttcaatgcctggaaactcaccgggttaatcgcgatgccgagaatgttgtgatgtacgttattgatggcgaagaagttgagcgaggttggcatctgggcgtacaggatataaaacaccaccgcttcgagcatcaggatgaaggcgacgaacatcttgttgcggccagttttatcgaggcgaaaggcttcgcggaagaagaaaatcgtcaccacgatggacagcacaatcagcaccaggttggcgattttaacgttatgcatcagccaggcgcagaggaaaatcatcactacggtgccgaccagcacatacagcagattacggaaactcagcggctgatgatccggggttgaaccgatatctttcaccattccgcgacaggcgaagtagaccagcagcgcgacgataagcccggctccgcacaggttgtaggttaccgcgtagccgaacttatcggcaataaccggcgccagcgacagcgacagcagcgaaccgatgttaatcgacatataaaacagggtgaaggcgccgtcgagacgggcgtctttaggcggatagcattttgacagtaggctcgcgggattggctttaaatagcccgttgccgacggcgatcgtgccaagcgcgataaagataagatcgggtttgagcagcgacaggccggtcataaagtagccgatagccagcacgacggcgccgagcaccagcgtgcgtttggttcccagcagatggtcaccgacatagccgccgatggaaatgaggccgtagaccagcgccgcgaaggcgccaaaggtgataaatgcctgttcctgagagaaaccaagctgtttaacaaagaacaccgccaggatgccctggacgccgtaatagccaaaacgctcccataactctacaaaaaaaatcatgaagaacggacggggttgctgtagcaaacccgtaggtgcagttgatttcatattccttcgccttttagtgctatcccaaaaagtatgaacgcgtctgccaaaacgcgccgaaaaagtctgatggcccataatgatgcggccattggctgaatgtatagattattatatagatattgattctaataaatggttgatcacactaaccgatattaattatctggattgatatcctgatggggtcaatgggattcaggcgggatgtagcataaaaacaaaaacgcccgcaggcgcgggcgttggctggcgagggaaagcgattattcgtcttcttcgtcgcgcagcggtacgatcagcatatcaacgtgaacggtgttgatcagctgacgcgcggaggacatcagcttgctccagaagtcctgatggtgaccgcagaccaccaggtccatatcatattttttaatcgcatcgaccagcacctggcccagatcgccgctgccgctcagggtttcggtaatcgggtagccagcgttagtggaaagctcggtcagcgcgtggtgcgtctcttcagagatgcgtttctgcatgtcgcccagattaacatcgataagaccggtgtagaggtcggagtaattcacatccacgtgaatcagggaaactttcgcattgtagggacgcgccatagaaaccgctttctctaccagcactttgctttccggtgataggtctactgcaataagaatgtgtttgtaagccatagtgttactccttccataagttgtcgatgaccgttggaccagacagcctgtgctgtcgattcgcccgcgtcctgcaagctagattcgcggggggtaagcctttaaggacttaattgtagaagataatttctacaatatagcgcccctcgcactccgtcaatgcacctggttcaccgttagttaaacaaattattccgtcttacgtattgataacgattaaccttgtggtaaaaaaattaactgatctcctacactatttaatgagccggtcggataaataaacgtgaccggaatcgcactcttttactgtacggtgggttggatgatattggggagcggtagtcccggagggatctccgtggatgggtcgccggggaggaagtatgatcagcactgttgcgctgttttgggccctgtgtatcgtttgtgtggtgaatatggcacgttacttctcatcgttgcgtgcattattggttgtgctacgtggttgcgatcccttgctctatcaatatgttgatggcggaggttttttcacctcgcatgggcagcccagtaaacaaatgcggctggtttggtatatctatgcccaacgatatcgcgatcatcatgatgacgagtttattcgtcgctgtgagcgtgttcgccggcagttcatcctgaccagcgcgctgtgtggtctggtgctggtgagtatgattgcactgcttatctggcattgagctgcctgaattgagtgcaaaaaaaatgggccagtttcctgacccatttttcgcatggctattgcttagataagcttcagagccagccagtacagcacgcctgacagcaaaatggctgccggcagggtgagtacccatgccatcaggatgctggtgacggttttcttctgcagaccgccgccatcaacgagcatcgtccccgcaaccgaggaagagagcacgtgggtggtggaaaccggcatgccggtgtagctggcaaggccgatagaaaccgcggcggtcatctgggcggacataccttgcgcgtaggtcatacccttcttaccaatcttctcgccgatagtggtcgccacgcggcgccagccgatcatggtgccaatacccagcgccagcgcgaccgccataatgatccagattggcgcgtactcgatggtgctcagcatatcggttttcagtttcttcagcaggcgctggtcgtcagtgctcacatccggcagtttggccactttgtcggtggtgtcggagatgcagagcataatgcgacgcagctggccgcgctgatccactgacagtgtatcgtagctttccgtaccggtgagcattgtcttcacgcggtcaagcgcgttgatggtgttcgccggatggcagtgaaactcgccgttggccgcggtattggtttccggtgacggaaccagttgatcaacgccggtggctttcttcagcagctcagggcgctgttggaagaaggtttccacgttgttgaccgcatcgcgggtacgagtgatttcgtaaccagatgcgttcatgttgaccacgaagcccgccggcgcgacgccaatcaagaccagcatgaccagaccaatgcctttctgcccatcgttggcgccgtgcgagaacgacacgccgatagcggacaggatcagcgcgatacgggtccagaacggcggttttttcttaccgtctttcttttcgcgttccgctggggtcaggtgtatacgagcgcgttttttggtaccgctccagtaacgacgcagaatgaaaatcaggccgcccgctaccaccaggccaacgatcggcgagacgataagtgaggcaaaaatgccgatgactttcgggatattcagcgcatccaccactgaagtaccggtcatcagcgcattggttaaaccaataccgatgatagcgccaatcagggtgtgagaactggaggccggtaggccgaaataccaggttccgaggttccagatgattgccgccagcagcatagagaacaccatggcgaggccatgtgcggaacccatgttaagcagcaggtccgttggcagcatatgcacgatggcataggctacgctgagaccgcccagcagaacgccgaaaaagttgaagagtgccgccatcgcaacagcaagctgcgaccgcattgcgcgagtgtaaatcaccgttgcaactgcgtttgcggtatcatgaaaaccgttaatcgcttcgtaaaacagtacaaaagctaaagcaagcaataataatagtccggtatgtaaatccagaccggcaaataaatgtagcataggacgttacgccattttgaggacatgaacgcggcgcattatcagtgactttagcggcgcgggcaaagtgaaatatagactttttttgattttcttcctgtttggtttctacccggttgggagtaatcctatatctttcaaagacgtaactgaatgttgtttttttcgtgctggtgtgaccagagtgaaatatttacaattcccgacaattggggaatgaggaaagttgagtggaaaggtttgatgccattgtgatcggcgccggtgcggcgggaatgttttgtgcggcgcaggcggggcagttgggctgccgggtgctgctgctcgataatggcaaaaagccggggcgcaaaatcctgatgtccggcggcggccgctgcaactttactaacatgtatgtcgaacccgcggcatatctcagccaaaacccgcatttttgcaaatctgcgctggcgcgctatacccagtgggactttatcgaactggttggcaaatatggtattgcctggcatgagaagaccttaggtcagctgttttgcgatgattccgcggagcaaatcgtcaatctgctgctgtcggaatgtgaaaaaggcggcgtacagatccgtctgcgcagcgaaattctcagcgtcgaacgcgatgaacaaggctaccggctacaggtgaacggcgaaacgctgacggcgaagaagctggtaatcgcttccggcggcctgtcgatgccggggctgggagcatcgccgtttggttacaaggtggccgaacagttcggtctgaaggtgctgccgacccgcgcgggtctggtgccgtttaccctgcataaaccgctgcttgagcagttgcaggtgctttccggcgtttcggtgcctgctaccattaccgccgagaacggtacgctgtttcgcgaaaacctgctatttacccatcgtggcctttccggcccggcggtgctgcagatttccagctactggcagcccggcgagtttgtcaccgtcaacctgctgccggactgcgatcttgaggcgttcctcaacgagcagcggggcgctcatcccaaccaaagcctgaaaaataccctggcgatgcagctgccgaagcggctggtcgaatgtttacagcagcttgggcagatacctgatgtgacactgaagcaactgaacattcgcgatcagcagacgctggtggagacgttaaccgcgtggcgcgtgcagccgaacggtaccgaaggctaccgaacggcggaagtgaccctcggcggtgtggacaccaacgaactttcgtcacgcaccatggaggcgcgcaaagcgccggggctttactttatcggtgaagtgatggacgtgaccggctggcttggcggctataactttcaatgggcgtggtcaagcgcctgggcctgcgcgcaggcgctggcggaagcttaatcagagagcccggggcaccctggcgcccgggctgtttcgatcagttcaacccaagaaaatactgggcgattttgaaatagataatcagcccggtgccatctatcagcgtggcgataaacggcgcggaaaccaccgccgggtcgataccgatccgcttaagcaacatcggaataaccgaagacaccaccgcgctccacaaagtaatgcagaccagcgtcaggctgacgatcagcgtgatttccatgccaatccccatcatccaggcgcgcaggcagcccgccagacccagggtcagggcaatcagaaacgaggtcgacacctctttgcggataacccgtcccatgtcacgtaaacggacttcacccagcgccatcgaacgcaccagcgttgaggtgatctgagttccgctgttgccgccggtgccgatcagtaacgggatgaagaaggccagtgcgatggccgattccagcgcctcttcaaaatgctgcagcacgctgctggtgtaggcttcggcaacaaataacagtagcagccagaccgagcgtttcttccacagagtccacggactgatttccagatacggtttttccagcggtagcgtcgccccctgcagctgggcgtcttcggtgacgtcatcctccagcagatgggcaatttctttttccatcaggcagccgaccagctcgcctttatcgacaaccggcaccagatcgaggccgcgctcggtgagttcggcaataacctgagggcgctcatcgtcgggtttgacgcgaaacagacagctgtccatcaggtagcgaatagactggcctacctctgcctcctgcaaaagttttttgactgataagctgccgcgcagcttgttaccggcgacgacaaatacctggccgggaatatcgtcgctggcgagctgcgagataaagtgttcacgcgcctcatggacgctgaaatgttcctgcagcgtaataaagtcggtacgcatgtactgggcgatcgcatcgccgtcgaagccagaggtcgcctgatgcgcggcgcagagttgaatggaagacatgattaaaatccctataaaaaatcactcataggggcgaacaagacagggttagcgcaggcagatccctacgtcctggttttagcactgcataacgtatctgaacggttaataccgccagaagttaccttggcaacaccttgattcgatggaagcctgtatttccctgagtggtctctctcgataccaacagggcggtaacttgtatttatgcaggagcctcgccataacgagatcgttaaatgaggcgccattattggcgaacagggataattaacaaagcgtatagtttatgtggtttatcaactgttgataaaccacataaatcattctcaattttttatggatttagcagcttaattttcaaggtttttatcaccccctaaacaccgcaaatgcccatgccgcacgccgcgctgggcaatcacctcgtcggcaaaatgttgtacttcgtccatgttgccttttagcaccgcgatctccagacagtcatcatgattgatgtggacatgtaacgtagcgaccgagagatcgtgatgctgatgcgaagaggcgaccagccggctcgccagttcgcgtttttcatgctcatacacgtacgacaggaccgcatagccgcgctgcgccggctgctgtagcggattatggtggagcgcgtcacgcagaatatcgcgcaccgcttccgagcggttgtggtacccgcggtgggcgctgtgcgcgtcgagcgcggccagcagatcatcatccagagtcagggttacgcgctgcatggcatggcctcgttaagcagagtgcggggaaagggtgggagtaccgcacgctgtagcgcctgtccggcagcggatgtaaggcgcaggggcagactaaccgcggccgtttcgacgatgcgtccgctatccatcaccagtacccgctggcaaaaacgctccaccagccgcaggtcgtgggtgataaacaggcaggcggtggcgaattgcgcctgcagacgtttcagcagggcgataatttccgcctgaagcatcagatcgagattcgataccgcttcgtcgagaattaatagctgcggcccgaccaccagcgcccgcgccaggcacacgcgctgcagctgtccgccgctgagctgcgccggacgcttgtcgagcagtgccggggcgaggtcaaccgccagcagcatctcctccacccgctgcatacgctcttcccgcgataaactaaacaggtgccgcagcggctcgctgataatctcgcgcaccgttttgcgcggattcactgcgctaatggcatcctgaaacaccagctgaatatcgcggcgaaaggcgccgatcgcctcccccttcagggaggtcagcgacgcgccgcgccaggcgacatcgccataccgcggcgtttcgagaccgaccagcatccgcgccagggtacttttgccgcagccgctgcgcccgagcagcgccaccgtttcaccgagggcgatgtcgaactggatatcgcgcaataccgcaccgtggtggggataatcgtggctcactgcgttcacgctgagtaaattcatggtgttttctccaggccatatagcgccagatgggcggccagcaggcgctggctgagcgggtgctgtggggcgctaaatagcgtgttaacgtcgcagtgttcaacaagacgaccgttttccatcaccgccacgtcatgcgccagccgggcgacaacgcccatatcatgggtcaccagcagcagcccctgcccgcggttggcgacgatatccgccagcaggtcgagaatgcgcgcctgggcgacggcatcaaggtcggtggtcggttcgtcggcgatgataaacggcgcgcggctgagcagggccagggccaccatcatcctttgcagcatgcccccgctcatctcgaagggatagcgcttgagcagcgagagcggattttccagccccacctcttccatcgccgccagcagcgcgacgttattggcctcgtggcccgctgcccggcaggtttcccgcgcgtgcgccgccatggtgtgcagcggattaaaggcgctgcgcgggttttgcataatggtggcgatggtcgcgccgcgcagctgttcaccgtataccgggataccgtcgagcagcacccggcccgcggtttgcctgacgccaggcggtaaaataccgagcgtggcggcgcaggtcagcgatttaccgctgccgctactgccgagcagcgccagcacctgaccgcggcgcagggtaagggaaacgtcgctgaccagcggacggtcggcgacgagcgagagttgttccagttggatcttttgcggcatcagtggttatgctccgcgatcagctgaggatcgagacgatcgcgcagcgcgtcgcccaccagattaaaagccatcacgctgataaacagcgccagtccgggccagaccatttgcagcggctgcgtccagatgtactggcgggcgtcgttgatcatcaccccccattccgccgtcggcgcgctgacgccgaggccgaggaatgacatcccggctacgtggagcatcatatgaccgatatctagcgaggcgagcaccagcagcgaagggatcaccgcgccggccagatggtcacgaaacaatggccaatgtcccgcgccgctcaggcgcgcggcgagaataaactcgcgctggcgcagagagaccaccagattgcgcaccatccttgcgtaccaggcccagtgcgacagcgcaatggcgataatcacgttgctaagaccggtaccgagtacaccgaccataaagaatgacagtattgaagtcgggaaggtcataaacagctcggccaggcgcatcaggccgcgatcgacacgtccgcccaccatcccggcggcgccgcccaccgtaaggccgatcagcagcaccagcagcaggcaggccatcaccgcgcccagcgagacgcgggtggcggcgagaaggcgcgagaaaatatcccgcccgagatgatcggtgccgagccagtgggcgtcgcccggagagagcagacgttgatggagatcgatggccgccgggtcatagggtagccaccagccgctgctcatggcgattgccgccagcagcgcaatagtgagtagcgccagttttaccggccagcggaaggtcgcgaacagcgtcatacggcggcctcctcatggcggcgtaggcgcggatcgagcgcggcgttaagcaggtcgaccgccagattggccagcacgaacaccgccaccatcatcagggtaaagcactggatcactgggtagtcgcgattgaatatcgcggaaaccgcatagcgaccgacgccgggccaggcgaagatattttcgatgatcatcgtcccgccgattagctcgccgatgtgcatacccagcgccgtcactaccggcaacgtcgcgttacgcagcacgtgtcgccgctccacctgaccctcgctcagcccgcgcaaacgcgcccagaccacgtggcgctggctggacacttccagcatgctggcgcgcagcagacgggcattgatcgccagcgacatcagggcgatggaaaacgccggtagtagcagatgtcgccagccgccgtagcccatcgccggtagccagcgcagatggacggaaaagagcattaccagcaaaaatgccagccagaagttgggcattgagacgccgaggaaggcaatcaatcgtacggcgaaatcaggtaagcggtcgcgatgccgcgccgcccagatccccagcggtagcgaggtcagcagaataatcaccagcgccgcgccggtgagctgcagcgtcgcgggcagaaaatgcagcaggtcgtccagcaccgggcgctggctggcgtaggagacgccaaaatcgagatgcagcgcgcgccacagccagtgtagatactgcagcgccagcggctgattgagcccgagctgctcgcgggtagcggcaatcatttcgctggtgggcggcacgttggagagacgcagatagtccagcgccgggtcgccggcgccaagacgtaataacaggaagatgatcgccgaggcggcaagcagcatcaacggcagcgggagcaggcggcgaagaagatatttcagcatcatggcgccaccggcgtaatgagatctaacggcagatcggtggtcaccggcgcgaagggcacttcgcccagcgttttgcgggcgacggacatcagcgagacgtagcttatcggcagatagaccgcttcgttgtgcaggcgggtgaggatatcgcgatacagttcgcgacggcggccctcgtcggtggtagtcaggacctcgccgatctctttatcaatctctgctttatccggcagtcctcgctgcgcctgatagtcggcgtgcgaagcgacgcgcattgagctcataaacgcgtgcgggtcgaacggcgcgccccaggtatggttgaagatcatcgtgaagcggccatcgtgctggcgggcatagatactgctctcctcttcgccgaccagcccgacatcgatacctacctggcgcagatcggcctggatgatttccgccatcgatttggccagcgcatcggtgccgataaacgccagttcaagatgcaacgggtgcccgtctttttcacgaatatccttgccgggcgttagcgtccagccggcgtttttcagcagagtacgggccttatccggattgaagcggcgcggcggcaggtcatccggcgcgtaaggtaccgagggcgcgaaaagcgtgtcggcgacctgttgggtgccgtacagcacgccgtcaataagcgcctgtttattgacggcatagttaagcgcctcgcgtaccgctaaatcattcgtgggcgcttgcagcgtattgagcgccagcatcacggtttgcgtcggggcggaaagacgcgtgcggtacgcgtcctgctggcgaaaacgggcgaacgtatccagcggcagtagcccttcatcaccgtacagcagatcaacttcaccggtttcaaaggcgaccgcccggctggtggcgtcggggatcactttcacggtgactttttcaagcgccggtttttttccccagtagtgcgggttgcgtaccagcacatcctgctgattaagctgcgaactggacagcatccacggaccggtgccgatgggcgctttgatgcctcgctgcgtactaccgtcaacaaactgcgagggggcgataaaacgaaacgggcggggaagggcgagttcctgcaggaacgggtagtaggcgcttttcagggtgatttgtagttcgttatcgctgagcgcttgaacgtcggttatctgattggtcaactccagccaggcgtgccgctggcggttggccagtactgcctggaaattggccactgcggcctgggcgttaaacggttcgccgttggagaagtagacatcatcgcgcagggtgaaacgccagattttaccatcggctgagtgaagccagcgggtagccagccagggtgtaacccggccatcggcctgatatttgactaacggctcatacaccatactttgggcgaacatttggttcggcgtatacagatgtggattgagaggaccgacgttaaccggccaggcgatggcgatttcatgcatggcggcgggcgcaagcagaggaatgcaggcgcagagcgccagcaaggtggtgcggaaaatagacaaggtttacatccagaaggaacgaaaagtatgacgattttaataatttgtcatacttaaggagtaacctggatcaatatgatgggagaaaaccataacaaaatcatatgtagcgtaagattacgattgtctgaacaaatccaacagggtggtgacctgttcatcgagcggcgccaggtcccgcttcactatcaaatgcagcggcgtggcgcggcgggcgccatggctcagcggcagtgctttcagcacgccctgttccaggtgtgcgcgtatccgctcttccggcaaccagccgaatcccacctgatacagcaccgcatcaatggcggcatcaatggtagaaaaggtccaggcatcgcgcgtggatgaggcgtcgccgctacggtcggcaatgcggatcagcggccagggggccagcgcgttgtcgtccagcggttcttccgattgcgacagcggatggtcgcgatgggcgaccgcaataaaatcgatattcatcagccattcgccgcgtccggtaatatcctggcgacgcgttaagaccatcacatcggcctcgctgcgggcggcgcttgcctcatcgacgttttccagcacttcggtcagccgaacctgagtttgcgggtagcgttgctgaaactgacgcaaaatggcgaagagccgctggcggggaaaaatgctgtcgacgaccagatccaggcgggtgcgcgcgccgttgcgcagcgtcgcggcgtgggtctcaacccacgaaaaggccttcagtagcggtttcacctgattaagcagcagttcgccagcgggcgtcagcaccgcccgtcgcccggacggcgccagcagcgccacccctaaacgttcctgcagcagcgccaggttatagctcaccgaagactggctgcggttggtctcttccgcagctttggcaaagctgcccagctcaatcaccttttccaatagcgcccattgttccagcgtggtcttgtgcatgattcatctaaaaattagattattttcatccaaacatagcgttattcattcaatttttaaagccgtattcttacctcaacgaaacagaggagaataaataatgagcactttcgacaaacatgacctcagcggctttatcggtaaacatctggtttatacctacgacaacggctggaactacgaaatttacgttaaaaatggcaccactctggactatcgtattcacagcggtatcgttgccaatcgttgggtgaaagaccagcatgcgtacatcgtgcgggtaggcgaaagcatttataaaatttcctggactgaaccaaccggtaccgacgtcagcctgatcgtcaacctgggcgacaaactgttccacggcaccatattcttcccccgctggatcatgaataacccggaaaaaaccgtctgcttccagaacgatcatattccgttaatgaacgcctatcgtgacgccggcccggcctacccgaccgaagtgattgatgaattcgcgactatcacttttgttcgcgattgcggcgcggataataacgatgttattaattgcccggctaatgaattacccgcagattttcctgcaaatttgtaatacagcagaaataattctgtgatctaacgctaatttttccgctagattaaaacgtaaataaatatttattgcgggctggttgacgattcgtttactttcacccgttaagccccaattttctctatgaaactggggctttttgctgctaattcctgccataagaaaatactatccatctgattctcaatgagatattactattctcgcgaaaaatattaatttcttaatattatcctaagcaacagcgactagatttataaccgtcgaaataccctggaatgaaatgtggcggtgaaccgacttcattttcattttgtttaagtccgctggcgcaggatatttctttctaccggcccccttttttagtgggctattaatagaacaggaaaaagatgagcgaatttctgccgttttcgcgcccgtcgatgggcgacgcagagctggctgcgctgcgtgaagttttgcaatcaggatggatcactaccggtcctaaaaaccaggcgctggaagaggcgttttgccaactgaccggcaaccgccacgccatcgccgtcagctccgctaccggcggtatgcacgtcacgctaatggcgatgggcattggccctggcgacgaagtgatcaccccttcgcaaacctgggtgtcgacgctgaatatgatctgtctgctgggcgctacgccggtgatgatcgatgtcgatcacgataatctgatgattacccctgaggcggtggaagcggcgatcacctcgcggacgaaagcgattattcccgtccactacgcgggcgcgcctgcggatatcgatgcgatccgcgccgttggcgagcgccacggtataccggtaatcgaagatgccgcgcatgccacgggaacgcactataaaggccgccacgtcggctggcgcggcaccgcgattttctcgttccacgcgatcaaaaatatgacctgcgccgaaggggggcttatcgtcaccgatgatgacgagctggcttcccgcatccgcagcctcaaattccacggcctgggcgtagacgcctacgaccgtcagacccacggccgcgcgccgcaggcggaagtgattactcccggcttcaaatataatctggccgatatcaacgccgcgctggcgctggtgcagctggataagctggcgcaggcgaatcaacgtcgcgctgaaatcgcccaacgctacctgcgcgagctggcggataccccctttaagccgctgaccattccggcatgggatcatcagcacgcctggcacctgtttattatccgcgttgatgaagtggcctgcggcatcagccgcgatgccctgatggaaaaactcaaagccatgggtataggcaccggtctgcacttccgcgcggcccatacgcaaaagtattaccgcgagcgttttcctgaagtttcgttaccgaataccgaatggaacagcgcgcgcatttgttccatcccgctgttcccggatatgaccgacgacgatgtcacccgcgtcattaccgcgctgcatcagttgtcaggacgttgatatgcttacttatcctcccgtaaaaaaagtctcggtggttatcccggtttataacgaacaggatagtctgccggagctgctgcgtcgtaccgacgccgcctgtgcgacgctagggcgccaatatgaaattctgctgatcgacgacggcagcagcgacgattccgcgcgcatgctgaccgaggccgccgaagccgaaggcagccacgtggtggcggtgctgttgaaccgcaactacggccagcactcggcgattatggccggtttcagccatgtcaccggcgatctgatcatcaccctcgatgccgacttgcaaaacccgccggaagagatcccgcggctggtggcaaaagccgatgaaggctatgacgtggtcggtaccgtgcgccagaaccgtcaggacagcatcttccgtaaatctgcctcgaagatgattaaccgcctgattcagcgaaccaccggtaaagccatgggcgattacggctgcatgttgcgtgcctatcgccgccatatcatcgacgccatgctcaactgccatgagcgcagcacctttatcccgattctggcgaataccttcgcccgccgggcggtcgagatcccggtgatgcacgccgagcgcgaattcggcgactccaaatatagcttcatgcgtctgattaacctgatgtatgacctggtgacctgtctgaccaccaccccgctgcgtttactgagtattttcggcagcgtgatagctctgttgggctttgccttcggtctgctgctggtggtgctgcgtctggccttcggtccgcaatgggcggcggaaggggtgttcatgctcttcgccgtgctgtttatgttcatcggcgcccagtttgtcggtatgggcctgctcggggagtatatcggccgcatctataacgatgttcgcgcccgtccccgttactttattcaacgtgttgttcgccagccggaaacggcgtctcaagaggaagatcgttcatgaaagcagtagtcttcgcttatcacgatatgggttgcgcaggtattcagtcactgctggatgccgggtatgacatcgccgctattttcacccatccggataaccctggcgaaaaccaattctttggttccgtagcccgtattgccgccgagcaaggtatcccggtatgggcgccggaagatgttaaccatccgctgtggattgaacgtattcgcgagatgaagccggatgtgctgttctcgttctactaccgcaacctgctgtgcgatgagatcctgaatatcgcgccgaagggggctttcaacctgcatggttctctgctgccgaaataccgcggtcgcgcgccgctgaattgggtactggtcaacggcgaaagcgaaaccggcgtgaccctgcaccggatggttaaccgcgccgacgcgggcgatatcgtcgctcaacaagctgtggctatcggcccggatgacgcggcgctggcgctgcaccgtaagctgtgcgccgccgcctccgatctgcttggccaggcgctgccggctattcgtgagggtaagactgaggagcgggcgcaggaccacagccaggcgacctacgttggccgtcgtaccccggaagacgggcgtctcgattgggataaaccggcgcagactctgcacaacctggtgcgcgcggtatccgatccgtggccgggcgccttcgcctatgccggcgcgaacaaatttatcgtctggaaatcccgcgtgcgcgccgatctgccggcggcgaagcccggcaccgttatctccgtcgcgccgctagtggttgcctgtcagcagggggcgctggaaatcgtcaccggccagaccgaacgtggcgtttacatgcagggcgcccagctggcgcaggcgctggggctggtgaccagcgcggtgctgagcagcaaaccggtggtggcggtgaagcgccgtacccgcgtgctgatcctcggcgttaacggctttatcggtaaccacctgaccgagcgcctgttgcaggacgacaactatgagatttacggcctggatatcggctccgacgccatcagccgtttcctcgactgcccgcgtttccacttcgttgaaggcgatatcagcattcactccgagtggatcgaataccatattaagaaatgcgacgtggtactgccgctggtcgcgatcgcgacgcctatcgaatacacccgtaacccgctgcgcgtgttcgaactggatttcgaagagaacctgaagatcatccgtgactgcgtgaaatataataagcgcattatcttcccgtcgacctcggaagtgtacggcatgtgcaccgacaaaaacttcgacgaagataattccaatctggtggtcgggccgatcaacaaacagcgttggatctactcggtttctaaacagctgctggaccgcgtgatctgggcctatggcgataagaacggcctcaagttcaccctgttccgtccgttcaactggatggggccgcgtctggataaccttaatgccgcacgtatcggtagctcccgcgccatcactcagctgatcctcaacctggtggaaggttcgccgattaagcttatcgaaggcggcaaacagaagcgctgcttcaccgatatcagcgacggtatcgaagcgttgttccgcatcattgagaacaaagatggtcgctgcgatggtcagatcatcaacatcggtaacccggaaaacgaagctagcatcaaagagctggcggaaatgctgctcgcctgcttcgagcgccatccgctgcgcgatcgcttcccgccgttcgccggcttccgcgaagtggaaagcagcgattactacggtaaaggctaccaggacgttgagcatcgtaaaccgagcattcgcaacgcgaaacgctgcctgaactgggaaccgaccgtcgagatggaagagaccgttgaacacactctggacttcttcctgcgcaccgttgagctcacggacgataaaaactcatgaaacaagtcggcttacgcatagatgtcgatacctttcgcgggacgcgtgatggcgtaccgcggctgctggccctgctgggcaagcatgggattcaggcaagcttctttttcagcgtcgggccggacaatatggggcgccatttatggcgcctggtaaaaccgaagtttctgtggaaaatgctgcgctccaacgcggcctcgctgtatggctgggatattctgctggccggcaccgcgtggccggggcgcaggattggcgcgggtaacgaagaggttattcgcgccgccgcgcacatccatgaagtgggcctgcacgcctgggaccactacagctggcaagcgtggagcggcgtctggccgcaggaacgtctgacgctggaaattgaacgcggtctgctcgaactggaacgcattatcggccgcccggtgacctgctccgccgtcgccggctggcgtgccgaccagcgggtggtaaaagcgaaagaatccttcgatttcctctacaacagcgattgtcgcggcacgcggccattcctgccgcagattggcggcggggcctccggcaccgtacaaattccggtgacgcttcccacctgggatgaagtcgtcggtagcgttgtggataccgccggcttcaaccgctatctgctggactgcattcatcgtgacaagggaacgccggtctataccatccacgccgaagtggaaggcattgcctacgccgatcagttcgatgcgctgctgaccatggcggaggaagaagaaatacaattttgcccactgagccagctgctgcccgctgactttagcgagctgccgtcaggcaaagtggtccgtggtgagctggctggccgggaaggttggcttggacgtgaacaattactgggctcgggtgtatgaaaagcattcgttatggcatctctctggttgtactctttgcgctgtattacttattgccgttaaatttccgtttgctgtggcagcctgatgaaacccgctatgccgagatcagtcgtgaaatgctggcctccggcgactgggtggtgccgcatctgctgggcctgcgttactttgaaaagccgattgccggttactggattaacagtattggccagtggctatttggtcataataactttggcgtgcgtttcggttcggtcttcgccattaccgtcagcgcgttgctggtggcgtggctggcgtggcgtattttccgtgataaacgcgtggcgatcctgtcgccggttatcttcctgaccgcgatgctggtatacggtatcggaacctatgcggtgctggatccgatgatcaccatgtggctggcgctggcgatgtgcagcttctggggagcctcccaggcgcagagccgcagcgggaagatgttgggttatgtcctgctgggagtcgcctgcggtatgggggtgatgaccaagggcttcctggcgctggcggtaccggtggttggcgtgctgccgtgggtgatggcgcgtaaacgctggcgcgaagtgctgacctacggctggctggcggtggcggtctgtacgttggtggtgctgccgtggggattggctattgccaatcgcgaacccgatttctggcgctatttcttctgggtcgagcatattcagcgtttcgctgagaaagacgcgcagcataaagcgccgttctggtactacattccgttcctgattgccggcagcctgccgtggttggcgctgttaccgggcgcgctgaagcgcggctggagcgagcgcgatgatgcccgcggcgcgctgtatctgctaggctggatagcgatgccgttcctgttcttcagcatcgccaagggaaaactgccgacctacattctgccgtgctttatgccgctgtcgattttgatggcccgctacgcgctggatgccgcgaaggcgggggcgaaagcgctgcgcatcaacggcatgatcaacctcggttttggtctgatcggcctggtcgccgtgctggtggtctcgccgtggggcgtcatgcataagccggtgtggacgaagatcgagctgtataaatgtctgctggcggcgattgcctttgccgtatgggcgctgatgggctggctggcgataaaagacaacggtcgtcgctggacgctggccgccatctgtccgctgggagtggcgctgctggtgggcttcgctatcccggatcgggttatcgacagcaaacagccgcagtttctggtggatattgttagcgaatcgctggcgccaagccgctatgtactgaccaacagcgtcggtatcggagcggggctggcgtgggagctcaagcgtgacgacatcatcctgtatgaaaggcagggggagctaaaatatggcctcggctggccggatgcgcagagcaaattcgtgtcgactcaagcttttgctgattggctggcggcgcaccgccagcagggaccgatctcactggtgctgctgatggataaaggtgaaacgatgaacgaactggcgttaccgaaacctgataactcctacgagctggggcgcgtggtgtttattcagtatctgccgcaatgagtgtctggttctgtctgatactcgccagtctgcttagctgcgccggtcagctgtgccagaagcaggcgacccggccgtcccgtagcgggcggcgcgggcggcatattttgctgtggctgggcttagccctgttggcgctcggcggcggtatgctgctgtggctgggggtgctgcaggcgatcccggtcggtatcgcttatccgatgctgagcctcaactttgtctgggtaacgctggcggcatggggtatctggcgcgagccggtggcgcgccgccactggcttggcgtcgggctgatcgtcgtcggcatcgccgttctggggagtagcgtctgatggggttaatctgggcgttattgagcgtcgggctggtcagcggcgcgcagctgttactgcgcagcgcgatggttgagctgccgccattgaccgatatcctggctttcctcaatcatctactgcatatgcgcaccggtaccttcagcctgggttttggcctggttggctatctgctgtcgatggtctgctggtatttcgcgctacaccgcttgccgttggccaaagcttacgcgctgctcagcctgagctacattctggtgtgggccgccgccatctggctgcccggttggcacgagccgttttactggcaatcgctgctgggcgtgctgattattatcgccggcgtgctgactatcttctggccggtcaagccgcgccgttgaaaccttgaatgtgcgccgccgtcagcgagaacggcgttggcgtacagaccgcaatacttaacccttgatactgaatctggcttaatgacagcgcgccgcgaaaggcgctgtcaacagaggccatctgccaggcgctgccgccgcgttgctttaccagcgcttctttgcgcgtccagattcgccaaaaggcggctagctgccgctccggcggttcgcgctccagttcctgatgctcgccctcgctaaacagggcgttagccaaccgctgccagccgttgcgcggacgaatcacttcgatatcgcagccaacctcgccttcatcgctcagcagcagggcaatatggtcgccgctgtggctaaggttaaaccaccgcccgcagccgggcgggaaagccggtttgccctgctcgccatacgcaatatccgccagcggggccgccgcatgcgccagcagcgcgcgcccggcaagccagcttgcccgccgtgggccgtcaggggcctgggccgctaacccagtcggtaacggcagggcgctaagctttgagatttggccaaggataagctgatacatttcaggaccagcgctgaataatcattgaggtgttaataccgccgaaggcgaagttgttactctgcaggaattcacaatcaatctggcgcgcttcgcccatgatgtaatccagttctccgcaattggcgtccggattatgcaaattcagcgttggcgcgaaccagccctcgcgcatcatctgcagactcatccacgcttccagcgccccgcaggcgccaagggtatggccgaaatagcttttcagcgaggagatcggcacgctatcgccgtaaatcgccgccgtcgcctggctttcggcgatatcgccgcggtcggtcgcggtgccgtgggccgaaatgtagccgatatcccgggcgctcaggcctgctatttttaatgattgttccatgcagatctgcatggttttacgctgcggttgggtgatatgcgcggcatcgcagttggtggcgaaaccgatgatttcgccgtaaatggtcgccccgcgtgctttggcgtgctccagttcttccagaatgagagtaccggccccttcgccaatcaccagcccatcgcgcagcacatcaaagggggagggggtaatgtcgggctgctcattgcgctggctggtagcaaacagagtatcgaataccgcggcctccgacgggcaaagctcttccgcgccgccggcgaccatcaccgtttgatagccgtggcgaatcgcttcccaggcgtaaccaatcgcctggcttccggaggtacaggcgctggacgtcgggatcacgcggccgcgcaggccaaaaaacaggcccgtattgacggcggtggtatgcggcatcatctgcacgtaggtggtagcagtaatattattggtgtgcttttccgtcaacatggtggcaaattcgctcatcggggcggtactgccggttgatgaaccgtaggcgatgccggtttcgccgttactcagtatggcatcgtcgataagcccggcctgctccagcgccagttcagtggcgcgggtggagagcaacgatacgcgccccatcgcgcgaatgcgcttgcgggtatagtggtcgggcagggtgaaatcatcgatcggcgcacccagcagcgtatgcagcccgtcgtaaatacgccactccggcatggcgcgtacggcgtttttatatctcttcagccccgccgagacatcctgccatttttcgccaaatgcggtgacgccgcccatcccggtaatgaccacacggcgtgtcataacatccctccattgatggaaatgacctgccgggtgacataacccgccacatccgacattaaataactcgccagccccgccacttcttccgcctgtcccatgcgtttcattgggatcatcgacatcgcttctttcaacgcggcctcttccatttcgatcatcccggtgtcgataagccccggggcaatgcagttgacggtgattttgcgcttcgccagttcaatggccagcgctttggtggcgccgatgatccccgccttggcggcgctatagttgacctgaccgcggttgcccatcacgccggatacggacgagagcgtgatgatacgcccgccctggcgcgcgctaatcatcggcatgatgcagggatgaatgacgttatagaaactgtcgaggttggtgtggatcaccgcgtcccagtcctcttcgccgagcgccgggaaagcgccgtcgcgggcgatgccggcgttgctgataatgccgtaccatgcgccgtgttcggccatatcctgctcaagagcttcgcggcactgcgtgcgattggcgacgtcaaagctcagcagacgccccgcgccgccggcggcggtaatcgcctccagcgtctgctgcgcgcctgacgtgtcgcgatgatagtggacgcctaccataaaaccgtccgccgccagctggcaggcaatggcgcgaccgatacctttgctggcgccggtaaccaaaactgaacgactcattctgacgctccttgttgaaatagggtgttaagttctgttggcgttggctggaaggtattaacccttccgctggccagcaggtcatcgtccgccatcacggcgccttcgaagctagcgaaacgctcgtcctgcatgagcagtttaacggtaatggacagtgctttgccgcgcggcagggagccggccgcgcagactaattctcgcgcgccaagcaccatacctaatgagatggacgcttgccctttttgcaggcggtgccagccggaccagacgccgacggtttgcgccattaattcaagggcgaaccaaccggggagattgccctcggcatcgagaaatggcgccaggacgctatggggcgagaccgtgacccggcaggtcgcggtttcatcggtcacattgacgacctcttccagcagcagcatcggtgcatcgtgcggtagatagtcgccgggcgataaatagtggttcattgaatgctcccgagcaggatgctggcgttgttaccgccaaaagcaaaagagttcgacaggataatcggtcgcggcagcggctggggatgttcgatgatcccgcatggcggtagtgtttcatcgcgcggcgactggctgaaatcctgcgctggcagcggcaggtttcgctgcagaatcagcatgccgatggcggcttcggtgatccccgcggcgcccagcgtgtgtccggtcaggtgtttcgttgaactacagggtacccgaacgccaaatagcgcgttgatgacgtgagactctattctatcgttaagcggcgtggcggtgccgtgcaggttgatataacccacttgttcaggggcgatgcccgcatcccccagcgcctgctggatggcgcggatcgccccctctccttcaggatgcggggcggaaatatgccaggcgtcgctggactcgccgatacccagtagcgcgactggctgcggttcgcgggtcaacagcatcagcgccgccccttcgccgatagtgataccgttacggtcgcgggcaaatggctggcactgcgtcgtggagagcgattccagactgtgaaagccgttgatcggcattcggctgagggtgtccgcgccgccgacgatcgccacatccgccagcccggcttcaattagtcggcgtccgctgataatcgctctggcgctggaggagcaggcggttgacagcgtaaatgccgggccatccagcgccagccagtggctgagaaaacgcgatgggtcgcccagctcctgttgcggatattgccaggccgcgctttccttgccgccaagcgtcagggtgacatgcgcgtcaccctcatccagccccgaggtgctggtgccgagcactacggccacgcgctctcgtccgtattgggcgatggcgcgatccacctgcggctgaatttgcgccagcgccgccagcagcagctgattattgcgcgaacgatgggcgctaaaggtatcgggaatggcgggcaattcgccgtccacacccgcgaacaccgcctgcggatgcccctgtagccacccctcgcgcggacgcatgccgggcgcaataccgcgagccaaattggcggcgatttcatcgttatcgcggcccagcgcgttaatcatgccgacggcggaaatgtagatcatctcagtcacccaggtattgaatggtgatgtggtatttaaagacgtgctgttcgatgctgatcggcacgcgctgacctttgcggttgatataggtgatttcggtgaccagcttcccgcgcgcgttacgtagttcgcgtttgtcgccgcgctcggtcaacgtccacccttttggcaactgcggcagccatgcgctaaccgaccagtggctgagcatcacatcggccagcacctggctggctggcggcagttgcggaaccaccatcgactgttcagcgcgcagccctctttcatcataggtcaccaggaacaggcggataccgacagatgacagacccgccagcgtgagctttttatcatcggcattgagcatgaccagcagcgactgggtttggccgttgaagctgccggtgagcaactgctgcgagctgatgtccggcgagataccaggcggcggcaacgtgacgcgcgtacccggttccagccacgcctgcgggcggccttgcggctccggctgcgaacggctgcagccggccagcaataaggcggcgagtagcgcgaaggcgcgccagaatgatggtcttctcatcgtctttttttctcttttttggtcggcatcgctaacggcgaaagcaggaaggcggcgaaaatgccgcttaccaaaacaataccaaaactgctaatggcctgcgtggcgctaaataccagcatgccgagcgtcaataaggtggtcatcatcgccagggtgaccgccagcagcgatgtcagcggcgtaccgcgcgggttgctgaaaaacagcgtgtagttaatgccgatgcccagtaccagcaccagcgccagcaaggagaacaggttaaccgcgtggccgctaaatgccagcatcgccagcccgcatcccagcgacaataccgacggcaccaggctaaccagccctttgcgccagccaaggcggagcatagcgccgcaggcaatcaccgccagcgcaacgcccagcaggccggttagaatgtggcggtagagcgcgaacaactggtcgaaatcgcttttgcgatcgacccacgcaacgccagcctgttttgtactaagcgtttttagcgccgcgctgtctttcacgccgctcaccgggaccagtacgccgctttcgccatccggcagcgtcagccacagcagtcgccaaccttcgctggccgggctggcaagccagacgtcgacggtcactggcatcgggttgagatcgggattgatcgttgccagtccggcgtggttcagcacgttactgacggtgggcgcggcgcgttgcagcagggcaagatcctgctgttggcgagcgagtgaattcagggggatagcgcgatatccgccgagcaggccgtcgctttgcgcctgcgtcagcgcgggcattaatgcctccaggcgctgcagcgtctgctgggccgttttgccgtaaatcacaaaccacttttgatcgacgctttgcccggtgagcgcggtgatggctttttcctgggccaggatatcctgcggcaacgcctggagctgcgaaatatcatcatccacccgcagcgtcgcgagacccgccagcgagaacagggccagcgcgacggggaggccgatggacagctttttatggcgtcgccaggcggcaagccagcgtaacaacaatgccatcgccggaaccgggcgcacgggaagtccacggcacaaccatggatgccagaaaattaccgtcagacacgaggcgctcaggccgaccgccgcgaagagcgccatctggcgaatcgccggaaagggggccagcatcataatcagataagccgccacggtagtaagtagtgccagcagcaacgcatgacgtactttggcgaggctttgccacggggttgattccgcgccatgcaccatccgttcggtcagataatagagcgtatagtcggcggagatgccgatgatgctcatgctcatcaccagggtcatcagatgcagctcgccaaatagcagcagcgtgacgacggtgccggccagcgcgccgatggcgatggaaatcaggcacagcagcagcgggcgcagcgaacgaaacgtcgcgacgataagcaggatcacgccgaacagcgtcgccgcgccgagtgtagaaatatcgtgcttcgcctgctgactggcgtaatcgctatagaacacggtgccgcgcgacagcagctgcgcctgcggatgctgcgttttccactgcttctccagctctccgagcgtagtgaccagccggtgcgtcttctgcatatcgaatgaggaacccgccagttcgccatgcaacagataccagaggttgccctgggcatctttggtcaccagccagccatcctgcagttgcatccgctggccgcctttcgccatcgccagctgcgagccgcgcatcaacatcagcggatcgttttgcagttctttgccgctgacgccggaaaatgccgaatagagctgtgagaggatccattgcgcctgcgcttcgccgccgttttgcaggcgcgcgcgggtagcggggtcaattaaaccgttacgatgctgccagaaaaaggtcccccaggcctgctgattatcggcattcattgggcctttgacgtctgccagcgccttcgaggtttgcagcagacgcagccagtcgccggccacctgcgggtcggcttgtttaccggggctgaccagccagaccagctggcgatcaaggcgctgcataaaaccgtcgttcaggctgggcgggattgcgccaagcgtctgcttcggcagcatcgccagtacgctgctgttgagccgggcctgcggcagcagcgccagcagcgcgcccgccaggagcaggcagacgacggcccataacagcgcggggcgtttactgggcggcaaagcgttggcgttcgtcatcggtcagttgcgcaggcgtcagttggtgttgggaaagggtgatatcggtacgatcgccttgcttgtcgttaagctgaatatgctccagataggtttttccggccaaatcgatgcgggcaaaaatcttatccagcggcgtagtggtgggcgtcaggcgcagcgtccactggccttcgcctttatcggcaaattccacgcggaagttatcttccaggacttttcgatccgcctggaacagcgcgcgcagcaaatggttgaactggaacatctgcggattgttttcggcagtaatggtttgcggcggctggccgttgatcgcctgcaccatccgtttgtcatccagcaacagctgcatcgggaatggcgaggtttgatcccacagcaaccccttatcgcgggcgatcaacatctgcccctgggatcgtagcggctgcggcagatccttaatcgtgcgaacttgatcgaagtgggcgcgcaccaccggctgttcgctaaattgtttttgcagatcatcaagcgtcagggcgctgaccagcgggctgataaacagccctaacagcagcagtaatctcatggcgtaacccccatgcgttcaaacaggatatccgggctgacgaaacacatctcgcggctgttttcatccaccgcaacctggatggtgtagccggtggtggtgcgcttgccgctatcgacatcaaaaatttcgtagccaatgcgtaggcggttctcaaactcttctatccgcgcgcgcacgcgaatgcgctgctcgaaggtgataacgtcgcggtatttcacgcgggtatcgaccaccggccacagatagcctgaggctttcatctgccggtagccgtagttgaactggttaagcagcgcctcacgggcaatttcgaagtagcggaaatagttgccatgccacacgacgcccatcatatcgatgtcatgaaacggaatagtcagctctacttcagcagtaaaacggggatcattaagcaccctttactccttgtctttgggatccggcagacgccagaaatcgaaaaagttaaaccagtcgagcggcgactgcagcgcgtagtgttccagccgttcggcgtagcggtcgatgatgtgttgcaatgcctgttggcgatcggtgcgcggtaatagcagagggtcggcgaacggctcgcagtaaatgcgcagtttgccctgctggcggagagcgaaaagcaaattaaccgggcagcgcaaaatggcggcgaggataaatggcccctgcgggaagggggcggcttgccccataaaacggctccagcagacacgccattctccgccgcgctgcgggttaaccgcaatacggtcgccgacaatcgcgatccactcgccgcgctccagcttttcttgcaacaggatggcggtatccgggccgatatcgttcaccggcatcaggttgagcccggcctgaggggccatttccgtcataatctgtttaaaacgttgcgcattttcgctgaataccagagcgttgatggttttgccgccctgtagttgcgccagcgcgcggcaggcttcgacatcgccgagatgcgaaaccaacagcagcttcccccgcggatcgctgatatttagcgtctcctcggcgcctgcggtaaaaaccacgtcgcggccgaactgcaattcgccgcgccagctggcgattttatccagcatcgcttcgccgaagcgctggaagtgccgatagctggttagcgttggcggtatcggcatctggcgagcggcgaactgttcgcgcacgcgggttatccattgttgcgaagcacggcgggccgtcgcggccgtcagccagtacacgccgaccaccggataaagcagcagcgagaacgccttgcgccccagcagccgccacaccagtagcatcaggcgcattccccataatccttttacctcctgctgacgcgcccagtgcggcgaggcgcggcgaaacaacagcgaggggatccgcggcagcatgccgaggaacagacgcgtgtgcatcagcgagatgcggcagttatctttgatggcatcaaaatgcgacaaaccgtccggcgggtaggtcacgcgggttggcacaaaatagctggtatttccctgccagtagaggcgcaccatcacttcggtatcaaaatccattcgctggccgagtgacacgcgctgcgccagctgtagcgttggcgtcaccgggtagacgcgaaaaccgcacatgctgtctttcaactgcagcgacagcgtttcaatccatacccagacgtgggttatccagcgcccgtagaggcgggaacgcgggatggagtcgtcgtaaatcggttgcccggaaatcagcgcttcgggatgggcctgcgccagcgccaacagttgcggaatatcttcgatggcgtgctgaccatcggcatcgacctgcaccgcgtggctgaacccggcttgcgctgcggcctgtagcccacggatcaccgctgcgcctttgcccgcgttctgtggtaagcggattaaggtcagattggcggtttccgccgccagccgctccaactgctgccgcgtactgctatcgctgccgtcgtccaccacgatgcaaggcaggccaaagggccgcaggcgcgccagcacccgcggcatcatggcgccgtggttatagcaggggatcagcacgcagggagagaaagctagcggcataagcgaattttcccgctgctggcggtgtgccgggtttcaccgtcatggcgctgatagctaaaggtcagggtctggcgcgcctcctgccatgtcagggtgagcgtgacgatcgcgcccggctgcagcggcgactgaaatttcacgttctgaatgtcatgaaagcgccagccgggcgcgagcaggcgggtggcgtaatgcatcgcccaatcgatctgtgcgacgccgggtagcagcggctgcacggcaaaatggccgcgaaaccagaacagcgccgggtcgagagagagcacgatttcaacccgatcggcttgcggctgacggcgctcaatttcatggggcttcatgaaataactcctgtaattgcgcgtagacacgcttattcatgctattaacggggatctcgtcaaccacccgccagtagcgagggatggccacaggttccagagaggcgcgcagcgctttccgccattgtaattcctggcttttcccccagcggcgacgggcgtcatgatcgagcactaacaacgcgccaacgctctggcggctgccgcgggtaatcggcaggacggcggcctcaagaatgccatccagttgcagtaaccggtattccacttcgcttagcgaaatgcgcttctcttcaattttcactacccggtcgcgacgacctgccagctggaattgaccgctttcattgaaatgcaaaatatcatcgataaccaggccgttatcgtcggcgataagcggcgaaaatagacgaattgtgttgccctgcggctgaaagcggatgcctgggaacggctgccacggcgcattatcttgcaggcgctggcggcaggcgataaccccgctttccgtgctgccgtagatttcatccggccaggtattgaaccagttagcggtgtgcacggcatcctgccagggcagcttaccgccggcggacaaaatcatcgcgaccggtggcggggtaagccgatagtcgagacgtttgagaaaagccgggctactgataaacaaataatgatgatcatggcttaatgccgccagctgctcggcgtactcaatcatcgccgcgtgcagcggcaaccccagcgccattggcaggaacagacggaacgtcaggccgtataagtgctgcggcgcgaccgatgccacgacccgactgcctgtcaggcgcccggcatagtgcgcggctatcagcgccgcctcgcggtcgagactcttaacgggcttactaattcgctttggttcaccggtagaaccggaggtaaaaagctcaatgcaggcgttatcgccgatcgccgggaacgcgtattcgtgggatgcggtcgccatggcggactggataacccgcagcggcccgcgccatggcagcgttttatcgctcaggatgccgtcgaaaagcgctcgctgttcgtgtaatagcgccgctcggctatggccaggaagcactggcgttttccccgcatgcagcgtggccaacagcgcgaccaaaaacaggtagctgttgtcaaaacagagcgcccaacgctcgcctggctgttgttgcaggttgttaagcaggtgagcgacatcatagcgcagatgcgccagcgtccagctgtgcgcttcctgccacgcaatcagcgtttgcggcggacgcggggcgctgagccactgggccagcgtgaggggctgcatcatggtttatctcgtttaatcacccgctggcgcaccagccactctccggccatcaacatgcccatcagcagataggaaatcatgccgttccacgccgtccatagcgacatatcgccatataacgcggtaaccagcgctataccgccgttgccgatgaaaaaggcgcaccagatttgggtgacccggcgggtgtagcgcacggcttgctcagaaagaaccgggtcccgcaaccgcgccaggcgctcgactacaggcatacttgaccacagcgaaccgccaaacaccgccagcatcacgccgctcaccaccaccgggtaaaatagcagtagctgatgggtctttagcaggtagctggcaatgcacagcgtcatgccggctaccgcaacgatctgagtgaccacgctcaacggccctgactgtcgccgggtctggcgaaagcgtaaaaacagcagtagcgccattagcggcaacagccatggcaggctgttatgcgcgaggccaaaccagatcaaaaatggccaggtcagcagtaataaccccgtcataattgaaacgaccggcagcgagcggatgcccgacacggtgaattacgcttctttcagcaggcgatccgccgcatcgactacgtcctgcacggtgcgtacggttttaaagtcttctggcttgattttcttgccgattttcttttgtagatggacgatcatgtcgatggcgtcgatgctgtccagttcgaggtcttcgtacaggcgggcctcaggtttaatatcctgcggatcgatttcaaacaccttcaccagcagcgcggagacttcttcgtaaatagctttttgttcggtcataacggttctcctcaggcacgctgcgcttgaataaaggatgccagcgtggcgacggaaaagaagtgctggcgcatctcttcgctttctgccgacagcaccacgccgtactgttttttcaccgccagacccagctccagcgcatcgatggagtccagacccagaccatcgccaaacagcgcggcatcggtgtcgatatcatcagcggacaactcgtccaggttcaatgtactgataatcagatttttaatttcaagatagagcgcttccatcattaattcctgtttcaggcgcaacgcctgattctaatttaagcaaaatatgccggtttaactgccgtgcggccagcgccggttcttgtgtgttggcattgtaaaattggtctattcgtagccgttctccgacttcaacggtaaataacggtttcgttcgcggcgggtcgtaccatttgctctgtttgcccagcatatgctcggtacagcggataacgacaacgcgtaaatcgctgccgcagcgcacggcgatattggccgcgccgcgctgcagctgcattttttctcccggcaccgttcgggttccttccgggaaaatcaaaatagtatcgccctgctgtaagcgttgccgactggccggaagcagggtatcggcgcgatcgttaatcaaataatccgccgcgcggatcacgccgctgacaaatgggtttttcagcaacgcacttttcaccaggcagtcggtttccggcatcaccgaggccagcatcacgtagtcgatgaggctgggatgattagcgaccaccaggcaaccgcgctcctgacgtaaaatctcgcgccctttaatctggtagtccagtacgccgacggctttcacgacattaagaaaaacacggaagctggcggaaatgctgcgccgcgcgagacgacgacggcgggagttatcgcgcaccacgatcagcagcagattgaaccagatcagtgacagcagcagcccaccgacgccaaacagtgcgaaacagaatccggtcatcgctgcgcgccacaggcgatttaaccgttggaaaagcggcgtcatgcgcggctccagcgccactgcacgcgctcgccgggcagggtgaacgtacgggaattctgcagatagtgccgtaaaaacagcaggctttgcggtagggggctttcaggaacggcatcatggcgctcggcctggcactgccattcgccgccggactcaataacccaggccgtcgcatagggccaggtcggcatagccgtcggcagctgcgaatggtaaaactccggcagaaaaccatcaaaatcaaccatcaacacgcgttgataacctgcctgcagaagccccatgacttcatataatccctgctggaaagtgtcgcgcccggcagaaagcgatgacgacgcaatgggctttttggccgcaatcgtcagattaccgacggcggaattatgtaccgatagggcgaaatcggtaggcgataccgcttgctccatcgccagggcgtggaggatccgatagttgcgctctagctcgccgtgacggctggtatagagaacggcgtcgatctcatggcggcgcagcatcgccagcccgcactcaaccgccagcttgctgccggagctaagtcggcgagcggtcatcattggcagttcgttgagtttggccgccggggccgccggatcgatggtgtgcgaataccgtgaccattgctgccactgttcggcttcgcaaagcccaggcgctctcgcctgccagtcgattatgttcagggtaaaattcatctacgcgcgtccgcggtaagcctgtagttctatgatcgcgacgtttatagaacccgaaacccggcgataaccatcacgaagccgttaattgggggctttgcaaccgaaaatcagcctcgccagctaagggtgacgccaagcatatccgcagcgcaaaactttgcgatgagataatgctgtattttcggtattttcaccgcttagtgcaatttattgcgttaatctccccataaaggatgataattccgctgaatagatggcgccaatagcgggaactgcaattaccgaccggacatggtaaatagtagatatctgttgccaatatctggtggaatctgatgcccgaacccgtcgccgaaccggcgctcaatggactgcgccttaatctgcggattgtctccgtcgttattttcaactttgccagctatctcactatcgggctgccgttggcggttctgccgggctacgttcacgatgtgatgggttttagcgccttctgggccgggctggtgattagtctccagtatttcgccacgctgctgagccgaccgcacgccgggcgctacgccgatctgctcgggccgaaaaagattgtcgttttcggcctgtgcggctgtttcctgagtggtttgagctacctgctggcagcctggagcagcagctggccactgctgagtctgctgctgttatgccttggacgagcgatcctcggcattggccagagctttgccggcacggggtcgacgctatggggcgtaggcgttgtcggctcgctgcatatcgggcgggtgatttcgtggaacggcattgtgacctacggcgcgatggcgatgggcgcgccgctgggcgtgctgtgctattcatacattggcctcagcggcctggcgatggtcattatggcggttgctctggtggctatcatttgcgcgctaccgcgaacggcggtgaaggcaacgaaagggaaagcgatgtcatttcgcgcggtgctgggccgggtttggccttacggcatggcgctggcgttggcttctgccggctttggggttatcgcgacctttattaccctgttttatgacgcgaaaggctgggacggcgcggcctttgcgttaacgctgttcagctgcgcgtttgtcggcacgcggctgctttttcccaacggtattaaccgcctcggcggcctgaacgtggcgatgctctgttttagcgtggaggttattggcctgctgctggtgggctttgcacaaacgccgctgatggcgaaagtcgggactttcctcaccggcgcggggttctcgctggtcttcccggcgctgggcgtggtggcggtaaaagccgtgccgcagcacaatcagggctcggcgctggcgacctataccgtatttatggatttgtcgttggggataaccgggccgctggccgggcttttgatggcgtggaccgggataccggcgatttatctggcggcggcagggttggtgatggccgcgctactgttgggctggcggttaaaaaaacggcccccggtggctgaaccggaggccgctgcatcagggcaataaaattagttaatgaccagcgtgttgacgatgctttccgcttcggtctgcgcctgctgctggttgtccgctggcagagtgacctgcagggtcagcagcttgtcatcgatcttaccgagcagcacggaagaccacgcggtctgacctttggcggagataatgctgtccagttgctgtaaggtgtggcctttaatctcaatcgatttgttagacacaacctgcagctgcgggtcgcggctgcgctgctgatcttccagacgtttggacagcaccgccagatcttcattagtgttgtcgccgacaatcacaatcaccgctttctggccggtggcgtcagaatagacatgcatattgttggcctgggtaccgagcttaccgctctggtcggccatgcccgcgggcagagtgaagctcagtttaccatccagcaggctaatcgcctggccgctggtattgctctctgctgccgccccgacggtcggcgcttttgaatcgctgttatcacaggccgcaagccccataaccagcaggccaataccgacatatttaaccaaattgcgcattgacatcttcctttcgataaacggccattaacggctcatccggttatcttatcacaaccgttagcgagtacctttaacctggctgcaatgccgacaaatcagatttatccgccagttttttcaacagcatattcaacagcacgccgtacatcggcaagaagaagacaatgctgataagcactttgaagcagtagtcgaccgtggcgatttctccccagtgggcggccataaacggatccggactgcgccagaaggcgatgaagaagaaggccagggtatcgctgacgttaccgaacagggtcgacgccgtcggcgccagccaccagcgacgattctgacgcaagcggttgaaaacgtggacgtcgagaatttgccccagcgcataagccataaagctggcggcggcgatacgggcgacgaacagattaaaggtgcccagcgcggcaaagccctgccactcgcccatataaaacagcgccgaaatgccataggaaataatcagcgccgggaccatcactgcgaagatgatgcgtcgcgccagcggggcgccgaaaatgcgcaccgtcagatcggtggcgagaaaaataaagggaaaactgaacgccccccaggtggtatggaaaccaaaaatggagatcggcaactggaccagatagttgctggaggtgatcaccagcagatgaaatagcgaaagccagacgagcgctttcttacgctgtacggtagtaaagggattcatattgtgacctttttatgtccgtcatgcttcataccaatgaaggaatcgggagcggaacgttggggtgagggaacccaattaaaaacggctgcatgatactgcgttgcgagcgtaatgcaatggttgtttttcgcgcaaacgttaacctggcttgcgtactggcgaagtgggggtaaactagggccgttttgttgaagtgagataaaaatgagcgaacttttttccagtcctgaccatacgctggacgcccttgggctccgctgcccggagccggtgatgatggtgcgtaaaaccgtgcgtaccatgccggtgggcgagaccctgctgattattgccgacgatccggccaccacccgcgatattcccggtttttgcctctttatggagcatgaactggtggcgcaggaaaccgaagccctgccgtaccgctacctgatccgcaaaagccactgaatccgcgttatccgggctacctaacggcccggaaccgcagccctgctaagcgcagcgcgagcagggaatacccccggatggcggcgcgttgcgccttatccgggctacctaacgctcagaaccgtagccctgctaagcgcagcgcgagcagggaacacccccggatggcggcgcgttgcgccttatccgggctacctaacgctcagaaccgtagccctgctaagcgcagcgcgggcagggaatacccccggatggcggcgcgttgcgccttatccgggctacctaacgatctggaaccgtgctgcgcgagcagggaatatctgttcaaccttactttttacgcaataaccgcagggcgttagccgttaccagcaccgtcgcgccggtatccgccagcaccgccagccacaacccggtcaggccgagaagggtcgtgacgaggaaaatccccttcaaccctaaagcgatggctatattctggcgaatattggcatgggtggcgcgcgccagcgaaatcatctgcgccaggccggtgaggcggttatgggtcagcgccgcgtcggcggtctccagcgctacatcggtgccgctgcccatcgcaataccgatggtcgccgctttcatcgccggggcatcgttgataccgtcgccgaccattgccagcggcgcgttggcgttaagcgccatcaccgcgttcactttgtccgccggcagcaatccggcgcggaactgcagacccagttcattggcgatagacgccgcagcgcgcgggttatccccggtgaggatcaccccttgtacgcccaattgatgcagctcttccaccgcctgacgcgcatcgtcgcgcagggtatcgcgcagcgccagaatgccgagcaaggtatcatcgcgcatcaccagcaccaccgtctgtccggcgctctccagttgctggatctgcgcctcatgttcagcgggggcggccttactggccgcgcagattaagatgcggctgccgttgacctcggcttctatcccggaaccggccagcgcccgctggttgcgcgcaacgggaagagtcagcttacgctgctgcgcttcgcggatgatagcctgcgccagcgggtggctggagccttgttcaaccgctgccgccagcgccagcaggccgttttcatcaacgtcggcggcggcgataacgcgggtgacctgcggttggccgatggtcagagtaccggttttatcgaacgccacctggcgcacctggcccaattgttccagcgccgcgccgcctttaatcagcgccccgcgccgtgcggcgaccgccaggccggaggtaatcgccgccggggtagagatgaccagcgcgcaagggcagccgatcagcagcagcgttaagcctttatagatccacggcagccaggcgctggcgaagaatagcggcggtacgatggcaaccagcagggcgactaccataatggccggagtgtagattcggctgaagcgatcgatgaagcgctcaatcggcgcccggcgctcctcggcttcttcaattagtttgaggatccggtcaatggcgctgtctcccggttcggagataacgctcaattgcaccagccgatcgacgctggtggcgccggcggctacgcgctcgccggctttacgctccaccggtaccgattcgccggtcagcgcgctttcgtcaaagctggcaaacggcgatagcagctcgccatcggccggcaggcgcccgccggcggcgacttcaatcacgtcgccaggacgcaggtcgcgctgggagacggtctcacgctcgccgttgcgcaggcgaacagcggtatcaggtttgagcgccatcagggcgctcacgccctgacgcgcgcggctggcggcccagccttcaagtcgttcgccgatcaggaacagcagcagcaccatcgccgcttcggcggtggcgccgataaacagcgcgccaatggcggcgacgctcatcagcgtttcgatggcaaaccagctgccgcttttaattaaccgcagcgcctgacgggcaaccggccacaggccgacgagggtagtggcgacaaacgccagtttgccgaacgggtggttaaactgctccagcccccagctgagcgccatcatcactaccagactcaataatgccaggttttcctgtagccctgaaccttgcggtttctcttcctgcggcgcgtcagcatcgcgcagggtataacccgcggcgcgtaccgcgttttcaacctgcgaacggatatcgctgtcggcattgaccagcagtttctcggtggcgaatagcacctgtacctggctgaccccgtcgatttggcgcacggcggtctccaccttacgggcgcaggccgcgcagtccatcccttccacctgccagctatagcgggcgccattgagcggctgctcagcggaggcggtttctccggcgcagttatgatcggtacagcagctttccgcgggcgctgtcgccggggtaaatttgaatgacgagaactgggggacttttttgtcctgagattctggtgtcgacatggcaccctccgggtaatgataattttctcattacccgcaggatacactctggagtcgactccagagtcaagcagtaaattacagatacagtgcgcgaacgatcaggaagtgcccggcaaagtagaaggccgcggaaatggcgttatcggcgcggaagcgacggcgatagtggctaatcagccagacggcgttacccaacagcagcgaagcggcgccaaggaagccggagagcgcggtatcggtcggccgcacgaaccacagttcgcccgccagccacaccatcaccagagtcataccgataaaggtcagcaccggcatgcgcatctcttccagtcgggtccagataatcgccagcagcagcgcgccgagcaccagcagtaccagcggcagcggccagaagaacgaaagcgtcatctggctggcgaaccagatcgtatacagcagatgagagaggaagaatgcgccaaccgcgtacatcacccgctggcgcggcagcagggttaacgcatcgccgagcagcgaagcgcacaggcccgccagcaccaggtagctaatggcgttgaacatcggcgcctgccaggctaacagcagcaacagaagcagggtgaccggtttaaagacccagcgctgccaggccggcccacgataggacgcatcgacgtaaagccatgcggagaaacagacagcaataaacgaccaaagcatagtaagtccctgtatctgttatcattaaataagcgattacgcttacggtaccggatctcagtgtagtggtttgggccagaagatgacaacgttattcaatgcgcgttatccttattcctgataattcttatgggtacgcaaatgagtaaagttccgctattttttgtgctggtggtcgcggtgattgtggtggcggcctcgtttcgctacgtgcagcagcgccgggagaaaatggataacgacgccgcgccgctgctgcagaagcgggtggtggtcagcaataagcgagaaaaggtgattaacgatcgccgctcgcgccagcagacggtgacgccagccggcagcgagatgcgttatgaagcgagcttccgcccggaaaatggcggtctggaagtggtgttccgccttgatgcgccgcaataccacgcgctgagcgttggcgaccggggaatgctgagctataagggctcaaaattcgtcgactttgttgccgataactgagccctcgattaaccgttacttcttcttcagcgtggccttcagctttttctgccaggccaccagttcaaatacgccgaagatgaaaatacgaatctgctcaaaacggctcagcggcggcgcatctttcgtttgcgtcgctttcaacagcgttagctgcaggccatgcatcagaatcataaaaatcagcgccacgttaacgaagatattcaacggttttgggaaaggttgaaacaggttcaacagcaaaaacgcccaaacgcatagcatcagcaggcggcctaaattaatcagcatggttttctccttgtgcctcgcgttgatacaggcggtaggcgacctgtccggcgactttttcgcgatacagctgccagtttgccggaaccggcggtagtccgttttctacttcgctctcgacataaatcagcgcttcatcagcgagccagtggtttttttccagcaggctgagcgtttcttccagcagccctttgcggaagggaggatcgacgaagacaatatggtgcggcgtacccggctggctgagaaacgccagcgtgttggtgttgaccaccttgccgttgttggctttcagcgtcgcgagatttttttgtagctgctgcgcgacgctgcgctccatctccagtagcgtggtgctggcggcatagcgtgacagcgcttccagccccagcgcgccgctgccggcgaagcagtcaaggcagtgggcgtcgatcatcgacggcgccagccagttaaatagcgtttcccgaacccggtcggtggtcgggcgcagacccgggctctccggcaccggtaatttacggccccgccactgtccgccgataatgcggatctggccgctgcctgcgtgatttggtttcttcatctctttgctcaagtctcaacttccagcctgctattctaacgatcgaagaccattgacgaaaccttaatccgggggcggtgatgcgagttaagttaagtgatagactatccaactaatttcatcattttttcagcttctgaagcggttgtgtcgaagctgcgccatgaataaacagcgaggagtgtggtcgcaaatggcaaaagagaaaaaacgtggcttcttttcctggctgggctttgggcaaaaagaacaggctcaggaaagcgaaacagaacaaaaagtagaagaacaacaagaggttgtggaacagactccggcggcggaaatgcctgcggaaaccgtacccgcggcggaaacggtaaaagaagacccggaggcctttgccgccgaggtcgtagaggttaccgaacaagttgttgaaagcgaactgtcgcatccggtggcggaagagagcgcggcgtcggaaatcgtagttgaagaagcgccggttgttcctgcggtagaagaaaaagtcgctgaaccgctggttgaagaggtgatagccgagccggttatcgccgaagcggtcgctgaacagacgccggaagaggttatcgtcgcggagcctgaggtcatcgaagatgagctcctcccggaagagcccgaagccgaactaagcgatgaagagctcgaagcacaagctctggcggtgcaagacgtagaagaggcgccggaagaagaagcggaaactcaggaagcggcgccgcaggagcaggaaaaaccgaccaaagaaggtttcttcgcccgcttaaaacgcagcctggtgaaaaccaaacagaatctgggttccggatttatcagcctgttccgcggtaaaaaaatcgacgacgatctgtttgaagagctggaagaacagctgctgattgccgacgttggggtggaaaccacgcgtaagattattaccaatcttaccgagggggccagccgtaagcagctgcgtgatgccgaggcgttatacggtctgctgaaagaagagatgagcgagatcctgacgaaagttgaggaaccgctgaatgttgaagggaaaacgccatttgttattctgatggtcggcgttaacggcgtgggtaaaaccaccaccatcggtaagctggcgcgtcagtttgagcagcagggtaaatccgtgatgctggcggcgggggataccttccgcgcggcggcggtggaacagttacaggtctggggccagcgtaacgagatcccggtgattgcccagcataccggcgctgattcagcctcggttatttttgacgccattcaggcggcgaaagcgcgcaatattgatgtgctgattgccgataccgcgggtcgtctgcagaataaatcgcatctgatggaagaactgaagaagattgtccgcgtaatgaagaaactggatgtcgacgcgccgcatgaagtcatgctgaccatcgacgccagcaccgggcagaacgcgataagccaggccaaactgttccacgaagccgtggggctgaccggcattacgttgactaagcttgacggaaccgcgaagggcggggttatcttctcagtggctgaccagttcagtattccgattcgctatattggcgtcggcgaacgtattgaagatctgcgtccgtttaatgcgggcgactttattgaggcactttttgcccgagaggattaagaatgattcgctttgaacaagtcagcaaagcctatctcggtgggagacaagcgctgcagggggtgacgttccacctgcagcagggcgagatggcgttcctgaccggccattccggcgcggggaaaagtaccctgctgaagcttatctgtggtatcgaacggccgagcgccgggaaaattctgttcagcggccatgatatcagccgcctgaagagccgcgaggtgccgttcctgcgccgccaaatcggcatgattttccaggaccaccacctgctgatggatcgcaccgtgttcgataatgtggcgatcccgctgattatcgccggcgccagcggcgatgatattcgccgccgcgtatccgcagcgctggataaagtcgggctgctggacaaagcgaaaaatttccccatccaactctccggcggtgagcaacagcgtgtgggcattgcccgcgcggtggtcaacaagccggcggtgctgctggcggatgaaccgaccggtaacctcgatgaggcgctctcggaagggattttacgtctgtttgaagagtttaaccgcgtaggggtgacggtactgatggcgacgcacgacctggggcttatttccagccgtccgtaccgtgtcctgacgctaagcgacggtcatatgcatggaggccatcggggtgaataagcgcgacgcagtgaaccagattcgccagttcggcagcaagttcgatcgtctccgtaacgccaccggcggcggcaacggcgggcgcaatgcgccaaaacggccaaaagcggcgccgaacccggcatcgcggaagagtaacgtctttaacgagcaggtgcgctacgcctggcacggcgcgttacaggatttaaaaagcacgccgctggcgacctttctcaccattatggtgatcgctatttcgctgacgctgccgagcgtctgctatatggtctacaaaaacgtcaacagcgcggcgtcgcagtattatccgtcgccgcagatcaccgtctatctggaaaaaacgctggatgacgatgcggcggcgcgggtggttggccaactgcaggcggagcagggcgttgagaaggtaaattatctgtcgcgcgatgaggcgctgggcgagttccgcaactggtccgggtttggcggcgcgctggatatgctggaagagaacccgttgccggcggtagcgattgtggtgccgaagctcgatttccagaataccgattcgcttaacaccctgcgcgatcgcgtctcccgtattcagggggtcgacgaagtgcgcatggatgatagctggtttgcgcgcctggcgtcgctgaccggactggtcggccgggtgtcggcgatgatcggcgtgctgatgatcgccgcggtgttcctggtgattggcaacagcgtacgtctgagcatcttcgcccgtcgcgataccattaacgtccagaagctgatcggtgctaccgacggtttcatcctgcgtccgttcctctatggcggcgcgctgttgggcttcgccggggcgtttttgtcgctgatcctgtcggagattctggtgatgcgcctctcctcggcggtgaccgaagtggcgaaagtgtttggtactaaatttgaactcagcggcttaggcttcgatgagtgtctgctgatgctaatcgtctgctcgatgattggctgggtcgcggcctggctggcgacggtgcaacatttacgtcactttacccccgactaaaaattttctggtataatctttccctgcactgaatatctctctgcagggaaagagtccctgttcgcctcttccctaatctttcatctccatgtcacattttgtgcgtaatttactcacaacgttgcatggaacttgtggataaaatcactgtctgatactactgtgggtgatattctcgttgctcataaatgctggcatgtttgttgcctgatggggacaagttcatgtcagacactatcgattgagaggatttgaatgaccaaagaaatgcaaactttagctttagcccccgttggtaacctggaatcgtacatccgggctgctaacacttggccgatgttatcggctgatgaagagcgggagcttgctgaaaagctgcattaccagggcgatctggaagcagcgaaaaagctgattctgtctcacctgcgctttgttgttcatattgctcgtaactactcgggctatggcctgccgcaggcggacctgattcaggaaggcaacatcggtctgatgaaagccgtacgtcgtttcaacccggaagtgggtgtgcgactggtttccttcgccgtgcactggattaaagcggaaatccacgaatacgtgctgcgtaactggcgtatcgttaaagtcgcaaccaccaaagcgcagcgtaagctgttcttcaacctgcgtaaaaccaagcagcgtctgggctggtttaaccaggacgaagtagagatggttgcccgcgagctgggtgtgtcgagcaaagacgtacgtgagatggaatcgcgtatggcagcgcaggacatgacctttgatatgtcgtccgatgacgaatccgatagccagccgatggcgccggtgctctatctgcaggacaaaacgtctaactttgccgacggcatcgaagacgataactgggaagagcaggctgctaataaactgactgatgcgatgcagggcctggacgagcgtagccaggacatcatccgcgctcgctggctggacgaggacaacaagtccacgctgcaggagctggcggatcgttatggcgtctcagctgaacgtgttcgtcagctggaaaagaacgcgatgaaaaaactgcgtgccgctatcgaagcttaatcttcgactttctgcgccgtagtgaattaagcctctgctgtttcagcgggggctttttgttttatatccccgtcatacccgtttcccctctccgcgcgatttgcctcgacctttagcttcagtcacataacttttacatctcctgcaaattgttgtttcaaattctgaaaaatggggtatgttttggcatagtgtgctgcaaaagcgcaggcggcagacccaaatgcagtcatactacacttaggatgactaaaaaatcagaataatgcgctgacaaacaacatcacaacaattgcaaaaaccataataatggggagcctcaggatgaatatgaagggtaaagcgttactggcaggatgtattgctttaattatgagcggttcagcgctggcggaagacattaaaattgccgtcgtgggagcgatgtccggcccggttgcccagtatggcgaccaggaatttaccggcgctgagcaggcggtggccgatatcaacgccaagggcggtatcaagggcaacaaactgcagatcgtaaaatatgacgatgcctgtgacccgaaacaagcggtggcggtcgcgaacaaagtagtgaatgacggcattaaatacgttatcggtcacctgtgttcctcatccacccagccagcgtctgacatctatgaagacgaaggcatcctgatgattaccccggcggcaaccgcaccggagctgacggcgcgcggctataagctgattctgcgcaccaccggtctcgactccgatcagggcccgacggcggcgaaatatattctcggcacggtgaagccgcagcgcatcgctgtggttcatgacaaacagcaatatggcgaagggctggcgcgctcagttcaggaaaacctgaagaaaggcggcgccaatgtggtgttctttgacgggatcaccgccggtgagaaagatttctctaccctcgtggcgcgcctgaagaaagaaaatatcgacttcgtctactacggcggttatcacccggaaatggggcagatcctgcgccaggcgcgcgcagccggtctgaaaacccagtttatgggcccggaaggcgtggctaacgtttccctgtctaatatcgccggcgagtcggcagaaggcctgctggtcaccaaaccgaagaactacgatcaggttccggcgaacaaaccaattgtggatgctatcaaagcgaagaaacaggatccgagcggcgccttcgtgtggaccacctatgcggcactgcagtcgctgcaggcggggttaaatcagtctgaagatccggcggaaatcgcgaaatacctgaaaggggcgaaggtggataccgtcatggggccgctgtcgtgggatgagaaaggcgacctgaaagggttcgagttcggcgtgtttacctggcatgctaacggtacggcaaccgacgccaaataatttaacctgcgcctttcacgccgcagatgcgttgtctgcggagcctttcatgccgcagatgcgttgtctgaccccggttgcgctgcgcttaccggggctacaatttccaggtagcccggctaagcgaagcgccgccgggttcttccctggtcacgctgcgtttattggggctacggcttaatgcttctcccaaccattctgctgggcgctgaaaccgagcgcctgcataaacgccgccatcacgccgcagtcttccacccccctatcggcaacgcgccagctattgatattcgggttatcgcttaacgtctcttccactaaatattgccccacgccgcggcggcgggtgacttcacgcacgcacagatcgctgagctcgccttcgacgccgcgcagggtaacgcgtacggcgccgagcagacgttcgttaaagcgggcggcgtaaatacgatggttttcatccagcatcagcgccgcaggatcctgcgacggccagattttgcctaaatcaatgcgatcctgatcgctgaagtgctgtaaacggataatggtgagcttcatacgcggcagttccagtcaaaacagatgcgacagtgtactcaaatttcttgtttggcggggcgctgttttgaactcattcatcaggggattcgttttcctggttgcgtgggggtagcgcaatacattatggatcgaaaaataagcagaattttaacctgatatgtagcgttttattccgccttatatgccgttattttatgctgtgaactggacttttttttgtttatcttcgcctgaaaccagaatattatcttttcttaatcacctgaaaaatagagattttaatcataattcaggtaaaaaactgcgctaaactattaaagttcatggtaaaaatggcgttgtttaataaaagcacagaatgctttttaaccataaaaatacaaaacatttacatcacatcacgaacggggttctgaagcatgaaaaggaacgcgaaaacgatcatcgcgggagtcgttgcattagcgatttcccacgcggcgttggcaaaggatattaaagtcgccgtcgtcggcgcgatgtctggcccggttgcccagtggggcgatatggaattcaacggcgcgcgccaggcgattaaagacattaacgccagcggcggcattaaaggcgacaaactggttggcgtcgaatatgacgacgcctgcgatccgaaacaagcggtcgcggtcgccaacaaaatcgtcaatgatggcattcagtacgttattggccacctctgttcctcctccacccagccggcgtctgacatctatgaagatgaaggcatcctgatgatctcccccggggcgaccaacccggaactcacccagcgtggctaccagtacattatgcgtaccgcaggtcttgactcttcccaggggccgaccgccgcgaaatatatcctcgaacaggtgaagccgcagcgtattgcgattattcatgacaagcagcagtacggcgaagggctggcgcgttccgtgcaggacaacctgaagaaagccggcgccaatatcgtcttctttgatggcatcaccgccggcgagaaagacttctccgcgctgctggcgcgcctgaagaaagagaatatcgacttcgtctactacggcggctactacccggaaatggggcagatgctgcgccaggcgcgctccgtcggcctgaaaacgcagtttatggggccggaaggcgtcggtaacgcctcgctgtccaacatcgccggcgcggcggcggaaggtatgctggtgacgatgccaaaacgctatgaccaggatccgtccaacagcgctattgttgatgcgctgaaagcggataaaaaagatccgagtggtccatacgtctggatcacctatgccgccgttcagtcgctggcgcaagcgatggacagaaccggcagccagcagccgctggatttaattaaagatttgaaagctcacggcgcgaagaccgtgattgggccgctgaattgggatgaaaaaggcgatctgaagggatttgaatttggtgtcttccagtggcacgcggatggttcatccaccgtcgctaagtaagacgcgttatcccaccgcccgcaccgcgcgggcggcatgaaaaaggttaccttatgtccgagcagtttctctattttctgcagcagatgtttaacggcgtcacgctgggcagtacctatgcgctgatcgctatcggctatacgatggtgtacggcattatcggcatgattaacttcgcccacggcgaggtctacatgatcggcagctacgtctcgttcatgattatcgccgccctgatgatgctggggatcgataccggctggctgctggtcgccgcaggctttattggcgccatcattatcgccagcgcctacggctggagtatcgagcgcgtggcctatcggccagtgcgcagctccaaacgtctgatcgcgctgatttccgccatcgggatgtcgatattcctgcagaactttgtcagcctgaccgaaggctcgcgcgatgtcgcgctgccgagtctctttaacggccagtggattgtcggccacagcgataatttctccgccactatcactaccatgcagctggtcatctgggtcgttacctttatcgccatgctggcgctgacgctgtttattcgctattcgcgaatgggccgcgcctgccgcgcctgtgcggaagatctgaaaatggcgagcctgctgggcatcaataccgaccgcgttattgcgctgaccttcgtcattggcgcagcgatggcggcggtcgcgggcgtcctgctggggcagttctacggcgtaattaacccctacatcggctttatggccgggatgaaggcctttaccgcagctgtgctcggcggtatcggcagtatccctggcgcgatgatcggcggcctgattctgggtatcgccgaggcgctctcttctgcctatctcagcaccgaatataaggacgtcgtctccttcgcgctgctgattctggtgctgttagtaatgccgaccggcattctgggccgcccggaggtagaaaaagtatgaaaccgatgcaaattgcgatggcgctgctttccgccgcgatgttctttgttctggcgggcgtctttatgggcgtgcagctggagctgaatggcaccaaactggtggtcgataccgccgccgatattcgttggcagtggattttcatcggcaccgcggtggtctttttcttccaactgctgcgcccgctgttccagaaagcggttaagaacgtttccgggccgaaatttattatgccggcgattgacgggtcgacggtcaagcagaagctgtttctgatagccctgctggtcattgccgtggcctggccgtttatggtgtcgcgcggtacggtggatatcgccaccttgacgatgatttatatcatccttggtctcggactgaacgtggtggttgggctttccggcctgctggtattgggctacggcgggttttacgccatcggcgcctatacctttgcgctgcttaaccactattacggtctcggcttctggacctgcctgccgctggccggcctggtttccgcggcggccggcttcctgctgggcttcccggtgctgcgtctgcgcggcgattatctggcgattgtgaccttaggcttcggcgagatcgtgcgtattctgctgctcaacaataccgagatcaccggcggaccgaacggtatcagccagatcccgaaaccgactttctttggtcttgaatttagccgtaccgcccgtgaaggcggctgggataccttcagcaacttcttcggtctgaagtacgatcccagcgatagggtgattttcctctatctggtagcgttgctgctggtggtgctcagcctgttcgttattaaccgtctgctgcggatgccgctcgggcgggcgtgggaagcgctgcgtgaagatgaaatcgcctgtcgttcgctgggtctgagcccgacgcgcatcaagctgaccgcctttactatcagcgccgcgtttgccgggtttgccggcacgctgttcgccgcgcgccagggcttcgtgagcccggagtcctttaccttcgccgagtcggcctttgtgctggcgatcgtggtgctgggtggtatgggctcgcagtttgcagtgatcctggcggctattctgctggtggtatcgcgcgagctgatgcgtgatttcaacgaatacagcatgttaatgctcggtgggttgatggtgctgatgatgatctggcgcccgcaggggctgctgccgatgacgcgcccgcagctgaagctgaaaaacggtcaggcgaaaggagagcaggcatgagtcagccaatattatccgtgaacggcctgatgatgcgttttggcggcctgctggcggtcaataacgtctcccttgagctgcgcccgcaggagatcgtttccttaattggcccaaacggcgcgggaaaaaccaccgtttttaactgcctgaccggtttctataaacctaccggcggcaccattatgctgcgcgaccagcatctggaagggctgccggggcagcagattgcgcggatgggggtggtacgaaccttccagcacgtgcgtctgttccgcgaaatgacggtgattgaaaatctgctggtggcgcagcatcaacagctgaaaaccggcgtcttctccggtctgctgaaaacgccggccttccgtcgcgcacagagcgaagcgctggatcgggccgccacctggcttgagcgtatcggcctgctggagcatgccaaccgtcaggccagcaacctggcctacggcgaccagcgccggctggagattgcccgctgtatggtgacgcagccggagatcctgatgcttgatgaaccggcggcggggcttaacccgaaagagaccaaagagctggatgagcttatcgccgagctgcgtagccatcacaacaccaccatcctgcttatcgaacatgatatgaagctggtgatgggcatttccgatcgcatctacgtcgtgaaccaggggacgccgctggccaacgggacgccggaagagattcgtaataacccggacgtgatccgcgcctatttaggtgaagcataatggtggtgacgcataagatggaaaaagcgatgttaacttttgacaatgtcagcgcccactacggcaagattcaggcgctgcacaacgtcagcctgcatatcaaacagggtgagatcgtcacgcttatcggcgccaacggcgcagggaaaaccaccctgctcggtacgctgtgcggcgatccgcgggcttccagcgggcgcattgtctttgacggtaaggatattaccgactggcagacggcgaaaatcatgcgtgaagcggtggcgatcgtgccggaagggcgacgcgtcttttcgcgcatgacggtggaagagaacctggcgatgggcggtttttttgccgaccgcgaccagtttcatacccgcatcaaatgggtgtatgagctgttcccgcgtctgcatgaacgccgtattcagcgcgccggcaccatgtccggcggcgagcagcagatgctggcgatcggtcgcgctctgatgagccagccgcgcctgctgctgcttgatgagccctcattggggctggcgccgattatcattcagcagattttcgataccatcgaacagctgcgtgagcaggggatgacgatcttcctggttgagcagaacgccaaccaggcgctgaagctggccgatcgcggctacgtactggaaaacggtcacgtggtgctggaggataccggcgacgcgctgttggccaacgaggcggtgcgcagcgcctatctcggcggttaatacatcgtaacccggcgtcattcatttcgccggtttgtagcccgggcgaggcgcttgcgccgaccccgggagccgatcgcacgaatattatccgtgtctcagctcccactttacttcccccgtcctttcatcggcttgtcatctctctgacccgttactatcttttttttgtaataaaaaagttatttttctgtaattcgaacatgtcatgttaccccgcgaacataaaacgcgtgaaatcgcgcatccggaacaacaagagagataaccgatgatatcgttacgacatacagctttaggactggcgctgagcctggcatttgctggccaggcactggcagtaaccaccatccctttctggcactcgatggaaggggaactgggtaaagaagttgattctctggcgcaacgtttcaacgcggccaatcctgattacaaaattgttccgatgtacaaaggcaactacgagcagagcctgagcgccggtatcgccgccttccgtaccggcaacgcgccggcgattctgcaggtgtatgaagtcggcaccgccactatgatggcgtcaaaagctattaagccggtgtaccaggtctttagcgatgcggatattaagttcgatgaatcgcagttcgtaccgacggtgtccggttattacaccgattcaaaaaccggccatctgctctcccagccgtttaacagctccacgccggtgctgtactacaacaaagacgccttcaagaaagcgggtctggaccctgagcagccgccgaaaacctggcaggatctggcggcttacaccgccaaactgaaagcggccggaatgaagtgcggctacgccagcggttggcagggctggatccagattgagaacttcagcgcctggaacggcctgccggtcgccacgaaaaataacggctttgacggtaccgacgcggttcttgagttcaacaagccggagcaggtgaagcatatcgcgctgctcgaagagatgaacaagaaaggcgatttcagctatttcgggcgtaaggatgaatctaccgagaagttctataacggcgactgcgcgatgactaccgcctcatccggttcgctggcggatattcgtcagtacgcgaaattcaactacggcgtcggcatgatgccttacgacgctgatgtgaaaggcgcgccgcagaacgccatcatcggcggggccagcctgtgggtgatgcagggcaaggacaaagagacctacaccggcgtggcgaagttcctcgacttcctgaccaaaccggaaaacgccgccgagtggcaccagaaaaccggttacctgccgattaccaccgcggcctacgatctgacgcgccagcagggtttctatgataagaacccaggcgctgatatcgccactcgccagatgctgaacaagccgccgttgccgttcaccaaaggcctgcgcctgggcaacatgccgcaaattcgcaccatcgttgatgaagagctggagagcgtgtggaccggcaagaaaaccccgcaacaggcgctggattccgccgttcagcgcgggaatcaactgctgcgccgtttcgagcaagcaaccaaatcgtaatctgtaacttgcccggtgacgctgtgcttaccgggcctacgatgtgccctatgtaggccgggtaaggcgtagccgccacccggcattgttcaggaataaaatcttcatgtcatcatcccgtccggtattccgctcgcgctggctgccctatgtgctggtcgcgccgcagctgattatcacactgattttctttatctggcccgcgggcgaagcgctgtggtactcgctgcagagcgtcgatccgtttggcctttccagccagtttgtcggcctggataacttcgtcacgctgttccacgacccgtactatctggactctttctggacgaccataaaattcagcaccctggtaaccgtcagcggcctgcttatttcgctgttttttgccgcgctggtcgactatgtggtgcgcggcagccgcttttatcaaacgctgatgctgctgccgtatgccgtggctcccgctgtcgcggcggtgctatggatcttcctcttcaatcccggacgcgggctgatcactcatttcctcggcgaattgggttacgactggaaccacgcgcaaaacagcggccaggcgatgttcctggtggtcttcgcctcggtctggaagcagataagctacaacttcctgttctttttcgccgcgctgcagtcgatcccgcgttcgctggttgaggccgccgccatcgacggcgccgggccgattcgccgcttcttcaagctggcgctgccgctgattgcgccggtgagtttcttcctgctggtggtcaacctggtttacgccttcttcgataccttcccggtgatcgatgccgccaccgccggcggcccggtgcaggcgaccaccaccctaatctacaaaatttatcgcgaaggtttcgccgggctcgatctttccgcttccgccgcgcagtcggtggtgctgatgttcctcgtcattatcctgacggtggtgcagttccgttacgttgaaagtaaggtgcgttaccaatgattgagaaccgtcgcgggctgacgattttcagccacaccatgctcattctgggtattgccgtcattttattcccgctgtatgtcgccttcgtggcggcgacgctggataacaaatcggtgtttgaaacgccgatgacgctgatccccggcggacatctgctggagaacatgaagaccatctgggtgaacggcgtcggcgtcaacagcgcgccgttctggctgatgatgctcaacagcttcatcatggcgttcgccattacggtaggcaaaatcgtggtgtcgatgctttcggctttcgccatcgtctggttccgctttccgctgcgtaacctgttcttctggatgatcttcatcactctgatgctgccggtcgaggtgcgtattttcccgacggtggaagtgatcgccaacctcaaaatgctcgacagttatgccgggttaacgctgccgttgatggcttcggctaccgccaccttcctgttccgccagttctttatgactctgccggacgagctgattgaagcggcgcgtatcgatggcgcttcgccgatgcgcttcttccgcgacatcgtgttgccgctgtcgaaaaccaacctcgccgcgctgttcgtcatcacctttatctacggctggaaccagtatctatggccgttgctgattattcaggatgtgaatcttggcaccgccgtcgccggtattaaaggcatgatcgccaccggtgaaggtactacccagtggaatcaggtgatggcggcgatgctgttgaccctgatcccgccggtcgtcatcgttttagccatgcagcgcgcgtttgtgcgcggcctggtcgatagtgagaaataaaatggctggtttaaaactacaagcagtaagcaaaagctgggatggcaaaacccaggtaattcaaccgctaacgctggacgtggcggacggggagtttatcgtcatggtcggcccgtcgggctgcgggaaatcaacgctgctgcggatggttgccggacttgaacgggtgaccagcggcgatatctggattgatcgtaaacgggtgaccgagatggagccgaaggatcgcggtatcgcgatggtgttccagaactatgcgctttatccacatatgagcgtggaagagaacatggcgtggggtctgaagattcgcggcatgggtaagggattgatcgccgagcgcgtacaggaggcggcgcgtattcttgagctggatggcctgctcaagcgccgcccgcgggaactgtccggcggtcagcgccagcgcgtggcgatgggccgcgctatcgtgcgtgacccggcggtattcctgttcgacgaaccgttgtcaaacctcgacgccaagctgcgcgtgcagatgcgtctggaactgcaacagctgcatcggcgcttgaaaacgacttcgctgtatgtcacccacgatcaggtcgaagcgatgacccttgcccagcgggtgatggtaatgaataaggggattgccgagcagatcggcacgccggtcgaagtgtacgaaaagcccgccagccgctttgtggcgagctttatcggcagcccggccatgaacctgctggaggggcgggtgagcgatgatggcggccgctttgagctggaaggcggcatacagctaccgatgaatcacgagcatcggcgttacgccgggcgtaaaatgactctcggtatccgcccggagcactttattttaagctcgcaggcgcaaggcggcattccgctgctgatggatacgctggaaattttaggtgccgataacctcgcccacgggcgctggggcgagcagaagctggtggtcagattgccgcatcagcagcgcccggcgggcggcagcatgctatggctgcatctgcctttggaacatctgcacctctttgatggtgaaacaggacaacgcgcatgagtaactggccttatccccacatcgtcgcccatcgcggcggcggtaaactggcgccggagaacaccctggcggctatcgacgtcggcgcccgctacgggcacacgatgattgaatttgacgccaagctgtcgaaggacgggcagatctttctgctgcacgacgataatctcgaacgcaccagcaacggctggggcgtggcgggcgagctgtcgtgggacgatctgctgaaggtcgatgccggcagctggtacagccgtgaatttaagggcgaaccgctgccactgctctcccaggtggcggaacgctgccgccgtcacggcatgatggccaatatcgaaattaagccgaccaccgggcaggggccgcagaccggcaaagtggtggcgctggccgcgcgcgatctgtgggccgatatgaccgcgccgctactctcatcctttgaaatcgacgcgctggaagcggcgcaggaagccgcgcccgagctgccgcgcgggctgctgctggatgagtggcgcgatgactggcgcgaattgaccgcccggctgggctgcgtatccattcatctcaaccacaagctgctggatgcggctcgggtagcgagcctgaaacaggccggcctgcatattctggtgtatacggtcaataaaccccagcgcgccgccgaactgctgcgctggggcgtagattgcatctgcaccgatgctattgacgtcatcgggctgaatttccagccttaatactgatttgcggcggacgatctttacgggttagtctgccgcagcatcccgccgttgttgttcggcagtacctgcggctgcgaattgagattgccgccctgcgccgcgcgctgctgattggtttgcaactggttctgcaaatgctgctgctgcgaacgggtctgattattcagattctgcttcagcatgctttgctgctgctgttgctgcatcttcatctcattttgcattcgctgctggctgggcaccacataacccggctggttagggttgttatcgatgttaatcggctgtgctaaaacgccgagcggcatcagcgccgccaggaataaaatcgctttcattgttttctcctcccgtgcgtgggatcacttaagtgtacctcgaattcgccataacaatgattttttaggagttatcaaccaggcttaagccgggatataaaacctacctttcaggagtaagacaatgataaaaacaacaatatggcgtcaggtggtcatcgcagcgttactggcggggggcagctttaccgtcgccgccaatccgccgcccccgccgccggtctcgtatggcgttgaggaagatgtgtttcacccggtgcgcgcccagcaggggatggtggcctcggtggatgcgctggcgacccgcgtcggcgtggatattttgcgtcagggcggcaacgccgtcgatgcagcggtggctgtcggctacgcgctggcggtcacgcatccgcaggccggtaatatcggcggcggcgggtttatgatgctgcgtactaaagacggtaaaaccacggcgatcgatttccgcgagatggccccggaacaggccacccgcgatatgttcctcgatgaacatggcaatccggacagtaaaaaatcgctgacttcacatctcgcttccggtacgccaggcagcgtcgcgggcttctctctcgcgctggaaaaatacggcaccatgccgctgaataaggtgatccgcccggcgattaagctggcggaagagggctttatcgttaacgatgcgctggctgacgatttaaaaacctatggcagcgaagtgatcccgcagcatgaaaacagcaaagcgattttctggaagagcggcgagccgctgaaaaaaggcgaccggctggtgcaaaagaatctggggaaaagcctggagctgattgccgagcacggcccggacgccttctataaaggggctatcgccgaccagattgccggtgagatgaaaaaacacggcgggcttatcaccaaagccgacctcgccaactacagggccgtggagcgtatgccaattagcggtgaatatcgcggctatgaggtttactccatgccgccgccgtcctctggcgggatccacatcgtgcagatcctcaatatcctcgaaaacttcgatatgcagaaatatggctttggcagcgccgacgccatgcaggtgatggcggaggcggagaaacatgcctatgccgaccgttcggaatatctcggtgatcctgacttcgtcaaagtgccgtggcaggcgctgaccagcaaagcttacgctaaagcgatagccgccgagattgatgtgaataaggcgaagccttccagccagatccgtccgggcaagctggcgccgtatgaaagcaaccaaaccacccacttctcggtggtcgataaagacggcaatgcggtggcggtcacctatacgttgaataccacctttggcaccggcatcgtggccggcgactccggcattatactcaacaaccagatggatgatttctcggcgaaacccggtgtgcctaacgtttatggtttagtcggcggcgacgccaacgcggtagggccgaaaaagcgtccgctgtcgtcgatgtcgccaactatcgtggtaaaagacgggaagacctggctggtgaccggtagcccgggcggtagccgaattatcaccaccgtgctgcaaatggtggtcaacaccattgattttgggatgaacgtcgcggaagccaccaatgcgccgcgcttccaccaccagtggctgccggatgaactgcgggtggagaaaggttttagcccggataccgtgaaattgctggaagcgaaagggcagaaagtcgcgctgaaagaggcgatgggcagtacccagagcattatggtggggccggacggcacgctgtatggcgcttccgatccgcgttcgcccggtgatttgaccgcggggtattgatgtgttgcccggtggcgcagcgcttaccgggtcgacaagtgtgcgaacggtaggccgggtaaggcgaagccaccacccggcaacacgctacttcattctcgccatataatacgcatccacatactcgccgttgcgcaatgcgtaacccttggcggtgccttcgatctcaaagccgtacttcttatacaccgcgaccgccggggcgttatcggcgaacaccgtcagctcaatgcgctcgacgcgcagccagttgtcgcacatatcaatcatggtgtgcatcagggcgctggcgacgccgcggttatgccagcgcgaatccacgctgataccaaaatcggcgacgtggctacggcgagggcgttggacgacggcaatgcataaatgccccacgacttgcccatcgatacaggccaccagctgcttcacgccgggcgtatcggttagccgctcccgccacatatgctcggatggatgagggacctgtagcgtgttgtgatacacctccggctgggcgtgaatttgacgaatcgcgtcaacatctttcggttcagcatggcgtatcacgatgtcactcattccttgttcctcatttggttaaaaagaccctttaaacatcactgactccggcgttcgagtcaacacgcattaattgcaaaaaaaagtagacaagtgcgaatgagaatgattattattgtcctgcattcagggagacccttgcggaaagcctgaaagcacgacattgctcacattgcttccagtattactttagccagccgggtgctggcttttttttgcgctcatttcaggcatgttgcgatttggcggatttcaccgcttcttctgcgaccaggccgacgatattacttttctttttgctctccgccgcggccaacacctccgcgctgccggtaaacaggccgccctttttaatcgccagcgcgcgataggcgagggtgccgtcgaggttgccatgttcctcaatagcaatgctatcgccacggcactggccatgaaccttgccgtcgacgatcagctcgcggcaactgatattgccctcgacctcaccttcgcgcatcaccttaatgagatgttctttggcctcaatgttgccggtgacctggccgtggatatagacatggccgctggcgacgatgttgccgacaaaatgcacgccgctggctatcaccgtggtttcctgttttttgacgcttgccgtttctggctctgttgccgccacggctggcgccgcgacttcagcagcctgcgcttcggttttatttttcttcataaacatagcgttaattttttcccgttgggtatgagtaaggaaagcgaaaagggtacaggccgctgccaggcgcgccagcgcggcctcatcgctaaaccaggcgatcagtgcgagaagccagaaaaaaatggcgcagtttatggcgagatactttttttccatcagcagcggctggctactccgttagtctttagcaacgtcctggttttgcccttcacttatccgcagtttcgtcattgggatcaagactttctgttgaaaaactgaaatttaatgacttattaatcaatcgcttattaataattgtgtatgagtgataaccgaaatattttgccggtgaattttccagctcagaggaaaaggaggatgaagtgagcccccggcttgcgctatggttaaaggcagcacatcaactaaggacagcgttatgattctgcactgcgcatttattggctttggtaaaagcacgacccgctatcatcttccttacgtcctgcatcgcaaagaccgctggcacgtcgcgcatatttatcgccgcagcgccaggccggaagaacaagcgccggcgtattcccatatccacttcaccagcgacctcgatgaagtgctgaacgacccgcaggtcaaactggtggtggtctgcacccatgccgatagccacttcgaatatgcgaagcgggcgctggaagcggggaaaaacgtactggtcgaaaagccctttaccccgacgctggcagaggcgaaagccctgtttacgctggcgaaaagcaaagggttgacggtgacgccttaccagaaccgccgcttcgattcctgtttcctgaccaccaaaaaggtgattgaaagcgggaagctcggcgaactggtggaaattgaaagtcattttgataactaccgaccggtggcggaaaccatccaggggggaccgcaaagcggcgatttctatggcctcggggtgcataccatggaccagatcatttcgctgtttggtcgcccggatcatgtttcctacgatctgcgctcactacgtaataaagccaatcccgatgacacgtttgaagctcaactgttttatggcgacctgaaagcgatcgtcaaaaccagccatctggtgcagattgactacccgaaatttatcgttcatggccataaaggctcgtttgtgaaatacggcattgaccagcaggagaccagcctgaaggccaacattatgccgggcgacgcggggttcggcgctgatgacagcgtagggcaactggtctatatcaacgaggcgggcgtggaggtacgtgaagaggtgccgctggaaaccggcgactacggacgagtgtatgacgcgctgtatgacaccctcgttaacggccagccgaattacgtcaaggaatctgaagttctcaccaatatggagattctgcagcacggttttgaacaaccttctccggctactattaccctcgcaaaataagaaaatctggctcctcgccgcttgttcatattttttgaacagaggagtcaattttcaccctctatgattgccggcggaatgggtccacacttactccatcgaaaacatacgggggtgcaacatgatctacttacgcaaagctaacgaacgtggccacgctaaccatggctggctggattcctggcatactttctctttcgccaactactacgacccgaactttatgggtttctccgcgctgcgcgtgattaacgatgacgtaatcgacgccggccaggggtttggcacccacccgcacaaagacatggaaatcctgacttatgtgctggaaggcgcggttgagcaccaggacagcatgggtaacaaagagcaggttccggctggcgagttccagatcatgagcgcgggtaccggcgtgcgtcactctgagtacaacccgagcagcaccgaccgcctgcgtttgtatcagatctggattattccagaagaaaccggcattacgccgcgctacgagcagcgccgctttgatgccgcgcagggcaaacagctggtgctgtcgccagatgcgcgcgaagggtcgctgaaagtgcatcaggatatggaactgtatcgctgggcgctgctgaaagatgagcagtcggttcaccagattgccgcggaacgtcgcgtgtggatccaggtagtgaaaggcgaagtgacgattaacggcaccaaagccaccaccagcgatggtctggcgatttgggacgagcaggcgatttcggttcacgccgacagcgatagcgaaattctgctgttcgatctgccgccggtttgatacgcgtcatccttcaagccgcatttttgttggctctcctcactcaccccgggcgcgtaccctttgtacgcttccggggattcgttgcgttgccgcctcaatgcaacttgaatgattttgcgtatcaactctaaataaatcttttggcccttttttctccgggaaggttgcgctttgtccgtgataaactgagaaaatgtttcccagccgatcacagtcaggacgatgaaaaagaaaagacccgtacttcaggatgtagccgatcttgtcggcgtgaccaaaatgacggtcagtcgctatttacgtaacccggaacaggtttctgaggccctgcgtggcaagattgccgttgcactcgatgagctgggttatattcccaatcgcgctcctgatattctctccaacgccaccagccgcgccatcggcgtactgctgccctcgttaaccaaccaggtcttctcggaagtgctacgcggcattgaaagcgtcaccgacgccttcggttatcaaaccatgctggcgcactacggctataagccggagatggaagagaagcgtctcgaatcgatgctctcctggaatattgacggcctgatcctcactgaacgtacccacacgccgcgcacgttgaaaatgattgaagtggccgggatccctgtggttgagctgatggacagccagtctccgtgcctcgacattgccgtcggtttcgataacttcgaagcggcgcggcagatgacggcggcgattatcgcccgcggtcaccgccacgttgcttatctcggcgcgcgtctggatgaacgtactatcatcaaacagaaggggtacgagcaggcgatgctcgatgccggcatgacgccctacagcgtgatggtggagcaatcctcttcctactcgtcagggattgagctgatgcgtcaagcgcgtcgcgaatatccgcagctcgacggcatcttctgcaccaacgatgacctcgcggtcggcgcggcgttcgagtgtcagcgtctggggctgaaaatcccggacgacatggcgatagccggtttccacggtcacgatatcggtcaggtgatggagccgcgtctcgccagcgtactgaccccgcgtgagcgcatggggcgcatcggcgccgagcgtctgctggcgcgcatccgcggtgagacgattacccctaagatgttagatttaggtttcacattgtcaccgggtggatctatttaaaccgacaagtttgaagtagatcacacatattcacatctggcacgaatggttattgcttctcccagggtccggcatgacaatgttaccgataacagttacccgtaacacttgcccgtaatcattaaccagtacgccgctttcgcgctgtatcagtcagccccggcgcggcgtaccagtccagtgggaggacgctttgagcacgactaaccatgatcaccacgtctatgtcctgatgggcgtttccggcagtggtaaatccgccgtcgccagcgaagtggcgcatcaactgaaagccgcgtttctcgatggcgattttctgcatccgcgcagcaacatcaccaagatggcttccggcgagccgctgaacgacgatgatcgcaccccgtggctgcaggcgttgaatgacgcggcatttgccatgcagcgcaccaacaaagtttcgctgatcgtctgctcagcgctgaaaaaaagctaccgcgacattctgcgcaagggcaacccgaacctctcctttatctacctgaaaggcgacttcgacgtgattgaaagccgtctgaaggcgcgtaaagggcacttcttcaaaacccaaatgttggtgacgcagtttgaaacactgcaggaaccaggcgctgacgaaagcgatgtgcttatcgtcgatatcgaccagtcactggaaggcgtggtcgccagcaccattgaggtgattaacaaaggcagtaactagtgagtactttaacgcttgttttaacagcagtcggctcggtattgctgctgctgtttttagtcatgaaggcgcgtatgcacgccttcgtggctttgatggtggtttctattggcgcaggtctcttttccggtatgccgctggataaaatcgcggcgacgatggaaaaagggatgggcggcacgctgggcttcctggcgatagtcgtcgcgctgggcgcgatgttcggtaaaattttgcatgaaaccggcgcggtcgaccaaattgcggtgaaaatgctgaagtccttcggccacaaccgcgcgcactatgctattggcctggccggccttatctgcgcgctgccgctgttcttcgaagtggcgatcgtgctgctgattagcgtcgcgttctccatggcgcgccataccggcactaacctcgtgaagctggtgatcccgctgttcgccggcgtagccgccgccgcggcattcctgctgccggggcccgcgccgatgctgctggcttcgcagatgcacgccgatttcggctggatgatcctgattggtctctgcgccgctattccggggatgattatcgccggcccgctgtggggtaacttcatcagccgctacgttgagctgcacattcctgacgatatcagcgaaccgcatctcggcgaaggtaaaatgccgtccttcggctttagcctctcgctgattctgctgccgctggtgctggtcggcctgaaaaccatcgccgcgcgctttgtgccggtgggatccaccgcctatgaatggttcgagtttatcggccacccattcaccgcgattctggttgcctgcctggtagcgatttacggcctggcggtacgtcaggggatggcgaaagatcgcgtgatggagatctgcggcgcggcgctgcagccggcgggtattattctgctggtgattggcgcaggcggcgtcttcaagcaggtactggttgactccggcgtcggcccggcgctcggcgaagcgctgactggcctgggtctgccgattgcgattacctgcttcgtgctggcggctgccgtacgtattattcagggctccgcgaccgtggcgtgtctgacggcggtcggcctggtaatgccggtcattgagcaactgaactacagcggcgcgcaaatggcggctctctccatctgtatcgcgggtggttcgatcgtagtgagccacgtgaacgatgccggcttctggctgttcggtaagtttaccggcgccagcgaagcgcagacgctgaaaacctggacgatgatggaaaccatccttggcaccaccggcgccatcgtcgggatgattgccttccagctgctgagctaagcaaaaataatttccccggacaccaccacggtatccggggaaaaatcagggtaatgccgcttatcctgaattctcttcggtaacacgctttttttccctcttttccacttccttttgccgtgaatatcagcgctacgacaatgttcgtattgctcgtaaggccttgcggcacaaggctttatccgttttttttcgcaagcgtgaaagcgatatttttcgcgctgaatccataatcaggatcaataaaatagcgacggaaaatattccattacgcgggttatttgcccgataatctttacgctttttatgactaccagcgacggtgggcggagtgtgggataagttgcttttctgattggcgcgcaatcattgattaatttcacttgcgactttagctgcattttgtaatgtgaaggacatcccagttggaaactggcctggcactaacagcacacacctcgcaggaatacgttatgaaaaatgttggttttatcggttggcgtggaatggtcggctctgttctcatgcaacgcatggtggaagagcgtgatttcgacgccattcgccctgttttcttctccacctctcagctgggtcagcccgcgccgtcattcggcggcagtaccggggggacgcttcaggatgcattcgatctggaagcgctgaaggcgctggacattattgttacctgccagggcggcgattacaccaacgagatttacccgaagctgcgcgaaagcggctggcaggggtactggattgacgcggcgtcttcgctgcgcatgaaagacgatgcgatcattattctcgacccggttaaccaggatgtcattaccgctggcctgaataacggcatcaaaaccttcgtcggcggcaactgtacggtgagcctgatgctgatgtccctcggcggcctgtttgcccatgacctggtggagtgggtcagcgtggcgacttaccaggcggcttccggcggcggcgcgcgtcatatgcgcgaactgctgagccagatgggccaactgcatggccacgtggcaagcgagctggcgaacccggcttccgcgattctcgatatcgagcgcaaagtgacgtcgctgacccgcagcggcgatctgccggtcgataactttggcgtgccgctggcgggcagcctgatcccatggatcgacaaacagcttgataacggccagagccgcgaagaatggaaaggccaggcggagacgaacaaaattctcgccaccgcgtcgccgatcccggtcgatggtctgtgtgtgcgcgtcggcgcgctgcgctgccacagccaggcgtttaccatcaagctgaagaaagatgtttctatcccgaccgttgaggaactgctggccgcgcataacccgtgggccaaagtggtgccaaacgatcgcgacatcaccatgcgcgagctgaccccagccgcggtgaccggcaccctgaccaccccggtagggcgcctgcgtaaactgaacatgggtcctgagtacctgtcggcctttaccgtcggcgaccagctgctgtggggcgccgccgaaccgttgcgccgcatgctacgacagctggcgtaaacgcaggacaaacgataaggggtgtggatacaccccttttttttgcgtaatacaaggagtaaacgcggatgttggatttttccccacggaggtaacgcagccttggctatgctttaagtaaggagttccttacctgaaggtgggacggagcaggaggatgcacgttggtgctgcgccgttcaggtcaaaaaagtcgccggttacaggaaagggcgacacttacaacaggatgaaagcatgtcgaatcgaatcgatagagacgtgattaatgcgcttattgcaggtcatttcgcggatcccttttccgtgcttggcatgcaccgcaccgaggcggggctggaagttcgcgcattattaccagatgccaccgaagtgtgggttattgaaccgaaaaccgggcgtaaagtcggcaaactcgaatgcctcgactcgcgcggattctttagcggcatgctgccgcggcgtaaaaacgcttttcgctaccagctggccgtcacctggcacggacagcaaaacctgattgacgacccttaccgtttcggcccgctgctgcaggacgttgacgcctggctgttgtccgaggggacgcacctgcgcccttacgaaactctgggcgcgcacgccgacaccatggatggcgtcaccggtacgcgcttttcggtctgggcgccaaacgcccgccgggtctcggtggtggggcaatttaactactgggatggccgacgccatccgatgcgcctgcgtaaagagtccggtatctgggaactcttcattcccggcgcgcttaatggccagctgtataaattcgagctgatcgatgctcatggcaatctacgggtcaaagccgatccttacgccttcgagtcgcagatgcgcccggaaagcgcgtcgcttatctgcgatttgccgcccaaagtcgagcagccggcggcgcgtaaagccgcgaaccagtttgatgcgccgatctctatctatgaagtgcacctcgggtcctggcgccgccataccgacaataacttctggctaagctaccgcgaactggcggaccaactggtgccttacgcaaaatggatgggcttcacccatctggaactgctgccggtaaacgaacacccgttcgacggcagctggggctaccagccgaccggcctctacgcgccgacacgccgcttcggtacccgtgaagatttccgctatttcatcgatgccgcccacgccgcgggccttaacgtgatcctcgattgggttccgggtcatttcccggcggatgactttgcgctggcctcatttgacggcacctcgctgtatgaacacagcgatccgcgcgaaggttaccaccaggattggaatacgcttatctataactacggccgccgcgaagtcagcaattacctggtaggtaacgcgctgtactggatcgagcgcttcggcattgacgcgctgcgcgtcgacgcggtggcgtcgatgatctaccgcgactatagccgtaaagcgggcgagtggatccccaacgaatacggcgggcgggaaaatctcgaagcgatcgagtttctgcgtaacaccaaccgtattctcggcgagcagacgccaggcgcggtaacgatggcggaagagtccaccgattttgccggcgtgacgcgtccgcccgccgatggcggcctcggcttctggttcaaatggaatctcggctggatgcacgacacgctggattatatgaaactcgatccagtccatcgtcgctaccatcacgacaaaatgaccttcggcatgctctacaactacaccgagaacttcgtgctgccgctctcccacgatgaagtggtgcacggcaaaaaatcgattctcgaccgcatgccgggcgacgcatggcagcgctttgccaacctgcgcgcctattacggctggctgttcgccttcccgggcaaaaagctgctgtttatgggcaatgaattcgcccagggccgcgagtggaaccacgacgccagtctcgactggcatctgctggagggtggcgacaactggcaccacggcgtccagcggctggtgcgcgacctgaaccatacctaccgccaccataaagcgttgcatgaacttgatttcgatccctacggcttcgaatggctggtggtcgacgatcatgagcgttcggtatttatcttcgtgcgccgcgataaagccggtaatgaaatcatcgtcgccagcaacttcacgccggtgccgcggcacaactaccgtttcggcatcaaccagccgggacgctggcgcgaggagctgaataccgactcgatgcattatcacggtagtaacgccggaaatggcggcgtggttgagagcgagtccgtcgccagtcacggtcgtcagcattcgttgtcgattaccctgccgccgctggcgaccatctggctggtacgggaggcctgatgacgacgcttgccgcgggaaaaccgacgcctttgggcgccagctatgacggcaaaggggtgaacttcaccctgttttccgcccacgccgagcgggtggagctctgcgtgttcgaccagcagggcaacgagcggcgctacgacctcccggcgcgcagcggcgacatctggcacggctggctggccgatgcgcgtccagggttacgctacggttatcgggtgcacgggccgtgggatccggcgcaggggcatcgcttcaatccggccaagctgctgctcgacccttgcgcgcatcaggtggcgggtgaactgctggacgacgagcgtctgcatggcggtatgcatgaaccggatgcccgcgacagcgcagccattgcgccaaaatcccaggtggtcgatctgcattacgactggctcggtgataaaccgccgcgcacgccttggggcgaaacggtcatttatgaagcccacgtcaaagggttgacctggctgcatccggagctgccggaggcgatccgcggcacctatcaggcgctgggccacccgctgatgatcgattattttcgccgtctgggtattaccgcgctggagctgatgccggtggcgcagttcgccagcgaacctcgcctgcagcggatggggctgagcaactactggggctacaacccgctggcgctgtttgcgctggagccgcgctacgccagccagccgcagcgggcgctcgatgagttccgcgatgcggtgaaggcgctgcacgcggcgggcatcgaggtgatcctcgatatcgtgctgaaccatagtgcggaaatcgatcttgaagggccgacagtctccctgcgcggtatcgataaccgcagctattattggatcagggacgacggcgattatcacaactggaccggctgcggtaacacgctcaacctcagtcatcccggcgtggtggagtatgccctgcagtgcctgcgcttttgggttgatgaatgccacgtcgacggttttcgcttcgacctggcgtcggtgatggggcgtacgccggaatttcgtcaggacgcgccgctgtttgaggccattcgccgcgacccggtattgtcggcgctcaagctgattgccgaaccctgggatattggccagggcggttatcaggtggggaacttcccgccgctgtttgccgaatggaacgaccattttcgcgataccgcgcgccgtttctggttgcaacaaaacgtgtcgttgggtgacttcgcccagcgcttcgccgcctccagcgatctctttgcccgcgatggcaaacggcctgcggcgacgatcaatctgatcacggcgcatgatggattcaccctacgtgattgcgtctgtttcaatcagaaacacaatcaggcgaacggcgaagagaatcgcgatgggactaacaataactacagcaataatcatggtatagagggattagaagccaatcttgccgtgattgagcggcggcgcgatagcgtacatgcgctcctgaccacgctgctgctgtcgcaaggaacgccgatgctgctggcgggcgatgagcatggccatagccagcacggcaacaataatgcgtactgtcaggacaatgccttgacctggctggactggcggcgggcaaatcacgggttaaccgcttttgtcgccgcgcttatccacctgcgtcggcgcattccggcattaacccgtaatcagtggtggcaggagcaggacggcaacgtgagctggctcaatcagcgcggagaaccgttaaacgccgacgagtggcaacatggcgccgcgcggctgcaaatcctgttatccgatcgctggttgatcgcgctgaatgccaccgcggaggtggcggatatggttttacccgcgggggagtggcgcgccgttcctccattcgccggagaggataatccggtcatcatggctgtctggcatgggcccgcgcacggagtttgcgtatttcaaaggtcgtagtccctgggggttttcggcgcgttcatgatgaatgggccgtgaagcaggggaatcaaaaggagttaatcatggttgggctagaaaagaacgatccgttgatgctggcgcgtcaacttcctctcaaatcggtggcgctgatccttgctggcgggcgtggtacccggcttaaggatttaaccattaagcgcgcgaagcctgccgtccactttggcggtaagttccgtattatcgacttcgcgttatctaactgtcttaactcaggtattcgccgcatcggcgtgattacccagtatcaatcacacactttggtgcagcatatccagcgcggctggtctttcttcagcgaagagatgaatgagttcgtcgatctgctgccggcgcagcagcgggtacatggtgaaaactggtatcgcggtacggccgatgcggtgacgcagaacctcgacattattcgtcgctataaagccgaatatgtggtgatcctcgccggcgaccacatctacaaacaagattactcgcgcatgctgatcgaccatgtcgaaaaaggcgcgcgctgcactgtcgcctgtatgccggtgcccatcgaagaagcatccgcctttggcgtgatggcggtcgacgaaagcgagaagatcatcgagttcgtcgagaaaccgaccaacccgccggcgatgccgaacgacgctacccgctcgcttgccagtatgggcatctatgtctttgatgcggattacctttatgaactgctggccgccgacgatctcgacgaaaactccagccacgacttcggcaaagatatcatcccgaaaattaccgaagctggcatggcttatgcacatcctttcccgctctcctgcgtgcaatccgacccgcaagccgagccgtactggcgcgatgtcgggacgctggaagcctactggaaggccaacctcgatctggcctcggtgacgccggagctggatatgtacgaccagcactggcctatccgtacccatatggaatcgctgccgccggcgaagttcgtccaggaccgctccggcagccacggcatgacgctgaactcgctggtttccggcggctgcattatctcgggctcggtggtggtgcagtcggtgctgttcccgcgagtgcgggtgaattcgttttgtaacattgattcggcagtcttattgccggatgtctgggtcgggcgctcgtgccgcctgcgccgctgcgtgatagatcgcgcctgcgtcatcccggaagggatggtcattggggagaatgcggaagaagatgccagccgcttctatcgttcagaagaagggatcgtgctggttacgcgcgacatgctgcggaaactggggcacaaacaggagcaataatgcaggttttacacgtatgttcagagatgttcccgttgttaaaaaccggcggtctggctgacgttatcggcgcgctgccggcggcgcagatcgcagacggcgtggatacccgcgtgctgctgccggggtatccggatatccgccgcgggattaccgacgcgcaggtcgtcacccgccgggatacctttgccgggcgcatcaccctgctgttcggccattttaacggcgtcggtatctatctgatcgacgcgccgcatctctacgatcgtccggggagcccgtatcacgacgccaacatgaacgcctataccgacaacgtgctgcgctttgcgctgctcggctgggtggggagcgaaatggcctgcgggctggatccattctggcgcccggaggtggtgcacgcccatgactggcacgcgggcctgacaccggcctatctggcggcgcgcggccgtccggcgaaatcggtgtttacggtgcacaatctcgcctaccagggaatgttttactcctggcatatgaatgagatagaactgccgtggtcgttctataacatgcacggcctcgaatttaacggtcagatctcgttcctcaaagccgggctgtactatgccgaccatatcacggcggtgagtccaacctacgcgcgggaaatcaccgaaccgcaatatgcctacggcatggaagggttgctgcgccagcgccaacacgagggccgcttgtccggcatccttaacggtgtcgatgatgctatctggaatccgcaaagcgatctgctgctggcggcgcgctatgaccgcgatagcctggaagagaaagccgagaataaacggcagctgcaaatcgccatggggctgaaggtggatgacaaagcgccgctgttcgccgtggtgagccgcctgaccagccaaaaagggctggatctggtgctggaggcgctgccgggcctgctggagcagggcgggcaactggcgctgctgggagccggcgatccggtcctgcaggagggcttcctcgccgccgccgccgaacatccgggccaggtcggcgtgcagattggctatcacgaggcgttttcgcaccgcatcatgggcggcgccgatgtgattctggttcccagccgctttgaaccgtgcggcctgactcagctgtatggcctgaaatacggcaccctgccgctggtgcgccgcaccggcggtctcgccgataccgtggccgactgttcgctggaaaacctcgccgacggcgtcgccagcggctttgtctttgaggacagtaacgcggtgtcgttgctgagggccatccggcgcacctttgtgttgtggtcgcggccatcgctgtggcgctacgttcagcgtcaggcgatgaatatggactttagctggcaggtggcggcgaaatcctatcgtgaactctatcaacgcttgatgtaaccacaggagctatggctatgaatgcaccctttagttatgcatcacccacgctgagcgttgaggcgttaaagcattctatcgcgtataagctgatgtttatcatcggcaaagatccggcgatcgccaacaaacacgaatggctgaacgccaccctgttcgccgttcgcgaccgcatggtcgagcgctggctgcgttcaaaccgcgcccagctgtcgcaggaagtgcggcaggtttactatctgtcgatggagtttttgattggccgcaccctctctaacgcgctgctgtcgttagggatttatgaagatgtgaataatgcgctggccgatatggggctcgatctggaagagcttattgatgaagaaaacgaccccggtttaggcaacggcggtttagggcgcctggccgcctgcttcctcgattctctggcgacactgggcctgccgggccgcggctacggtatccgctacgactatgggatgtttaagcagaacattgtcgacgggcggcagaaagagtcgccggattactggctggagtacggcaacccgtgggagttcgaacggcacaatacgcgctataaagtgcgtttcggcggccgcgtgcagcaggaagggaaaaatacccgctggatagagaccgaagagattatcgccgaagcctacgatcagattatccccggtttcgataccgatgccactaacaccctgcgtctgtggagcgcgcaggccagtagcgaaatcaacctcggtaaattcaaccagggcgactactttgcggcggtggaagataagaaccactccgagaacgtttcgcgggtgctgtacccggatgactccacctattccgggcgcgagctgcgcctgcgtcaggagtatttcctggtctcggcgacggtgcaggatatcctcagccgccactaccagctgcaccgcacctacgacaatctggcggcgaaaatcgccattcacctcaatgacacccacccggtgctgtcgattcctgagttgatgcgtctgctgatcgatgagcacaaatttagctgggatgaagccttcgaggtgacctgccaggtcttctcctataccaaccatacgttgatgagcgaagcgctggagacctggccggtcgatatgctggggaaaatcctgccgcgccatctgcagattatcttcgagattaacgattacttcctcaagacgctgcaggagcagtatcccaacgataccgcgctgctcagccgtacctcgatcattgatgaatccaatggtcgccgggtgcgtatggcgtggctggcggttgtcgtcagccataaagtcaacggcgtgtcagagctgcattctcgcttaatggtcgagtcgctgtttgccgagtttgcgaagattttcccgatgcgctttaccaacgtcaccaacggcgtcacgccgcggcgctggctggcgttggcgaacccgccgctgtcgcaggtgctggatgagaatatcggccacacctggcgcaccgacttaagccaactaagcgatctgcagcagcatattgattatccgacggtgaaccaggcggtgcgccgcgccaagcttgagaataagcagcggctggcgaactatatcgcccagcagttgaacgtggtggtcaatcctaaggcgctgtttgatgtgcagatcaaacgcatccacgaatataaacgccagctgatgaatatcctgcacgtcatcacccgctacaatcggatcaaagccgatccgcaggcggagtgggtgccgcgggtgaatatcttcgccggcaaggccgcgtcggcttactacatggcgaagcatattattcatctgatcaacgatgtagcggcggtggtaaacaacgatccgcagattggcgataagctaaaagtggtgtttatccccaactacagcgtgagcctggcgcagctgattatcccggcggcggatctctccgagcagatttcgttggcgggaacggaagcgtccggtaccagcaatatgaagtttgcgctcaacggcgcgctaaccattggtacgctggatggcgctaacgttgaaatgctggagcacgtcggcgaggacaatatctttatcttcggtaataccgcggaacaggtagaagccctgcgcagtaacggctataaaccgcgcgactattatgagcaggatgaggagctgcatcaggcgttgacgcagattggcaccggcctgttcagtccttcggagcctggccgctaccgcgacctgctggattcgctgatcaactttggcgaccactatcaggtactggcggactaccgcagctacgttgattgccaggataaggtggacgagctgtaccgccatccggaggagtgggccaataaagcgatgatgaacatcgccaatatgggctatttctcatccgaccgcacgatccaggagtacgccaaacatatctggcatatcgacccggttcgtttgtaatcggttaagcatcagtaaaacggggccagttggccccgtttttgtgtgtgcggtgatgtagcccgggccaggcgtcagccgccgcccagggtatatcaggacgctaacgacagttcagactttcccgtatgttgcgccagccactcgctgatacgcgcctgctgctcggcattcagccacatcccctgtttggtacggcgccagatagcgtcacccaggctgcgaacccactcgtgttcgaccaggtacttcagctcggcttcataaaactcgtggccaaaatcttctcccagatcggcaagcgaagtcgcttcgccaaggatccactcgctgttgctaccgtaggttcgggcgtagtggcgggccattgattcgctgataaacgcgaaacgacggcgcagtttcgccgcgtagtcgtcgcggtcgccgccgatatcgccgccgggcagaacggcggttttagtccacgccgggccaatcccctgataatacggggtcagtttttccagcgcatgttccgccagtttacggtaggtggtgagcttgccgccgaataccgacagcagcggcgcctgaccgttctcatcatgaatatcgagggtatagtcgcgggtaatcgcctgcggcgagtcggattcatcgtcgcacagcggacgcacgccggagtaggtccagacgatatcgtcgcgcgacagcgtctttttaaagtgcgcgttgtagacgttcagcaggtagttgatctctttatcgtcgatcgccacctcttttggatcgccgttgtactcgacgtcggtggtaccgataattgagaactcatccatccacgggatgacaaacacgatacgtttatcttcgttttgcaggatataggcctgcttctgggtgtgcacgcgcggcaccacgatatggctgcctttgatcaggcggatgccatacggcgagcgcagatgcatgccttcgtcgaagaaatgtttcacccacgggccggtggcgttaaccagaccgcgcgcgtgccaggtgaatttttcgccgctatcgatatcttccgcttccaccacccacagaccgttttcgcgttttgccgagatagcgcgggtgcgggtgcgaacctcgccgcctttacgtaccaccatctgggcgttggcaagaaccagacgcgcatcgtcgacccagcagtcggaatattcgaaaccgcgcacgatttccggcttaagtaccgattccgcgccaaagcgcaaaccggtcgagcccggcaggctggtgcgtttgccgaggtgatcgtataaaaacagaccgatacgaatcatccacgccgggcgcagatgcgggcgatgtggtaagcgaaagcgcatcgggaaggccaaatgcggcgccatttttaataacacctcgcgctccgccagcgcttcgctgaccaggcggaattcgtagtgttccaggtagcgcaggccgccgtgaatcagttttgagctggcgctcgaggtggcgcaggcaaggtctctcgcttccagcatcagcacggataaaccgcgcccggcggcgtctgccgcgataccggcaccgttgatgcctccgcctatcacaatcagatctttgatttccacgctcgcacctcgttcactttcgtttaagctcataaatgttcgatatcgctcactatagcaaacaaacgcgcttttggtaacatcaaaaaaacatttcagagtgatgcatgtaacatattggcgtttatttaccgcctgacggtacactagcgggtaaaatcagggtcggtcaccgcccgtcatgaagtgcaatagagaagagaatcatggaacaatttgaatgtatcaatgtagaagaagcgcatcagaaactgcatcagcagaaggcggtgctggtcgatatccgcgacccgcaaagctatgcaatggggcacacgccgggcgcgtttcatctgaccaacgataccctgggcgcttttatgcgcgataacgactttgagacgccggtgatggtgatgtgctaccacggcaacagcagtaaaggcgccgcgcagtatttactgcagcagggcttcgagaacgtctacagcgtcgacggcggttttgacgcctggcatcgtcatttcccggcggaagttgcacacggctcgctataagcgcggtacggtatatactagccccctttgtgtggaataagcgatccgctgtatgttaatgattacctcttttgccaacccgcgcgtggcccaggcgtttgtcgactatatggcgacgcaaggggtcatcctgactatccaacagcacacgcagagcgatgtctggctggctgatgaaacccaggccgcgcgggtgcaggccgagctggcccgttttctcgaaaacccggccgacccgcgctatctcgccgccagctggcaatcggggcataccaatagcggattgcattatcaacgcttcccgtttttagctaccctgcgtaacaacgccgggccgtttacgtgggcgattttgctggcctgtatcctggtcttcatactgcaaaacgttctgggcgatcagacgatgatgatctggcttgcctggccctacgatccttcgctgaaattcgaagcctggcgctatcttacccatgctttcatgcacttctcgctgatgcatattctgtttaacctgctatggtggtggtacctcggcggtgcggtggagaagcgcatcggtagcggcaaactggtggtgattaccattatcagcgctctgctgagcggattcgtccagcatcaggttagcggcccgtggttcggcggtttgtcgggagtggtctatgcattaatgggctatgtctggctgcgcggcgagcgcgacccgcagagcggtatttatctgcaacgcggtctgatcctcttctctttagtgtggttagtggctggatggtttgatgttttcggcatgtcgatcgccaatggcgcgcacgtggcgggcctggcagtcgggctggcgatggcgcttgtcgatacgctaaatgtgcgaaaacgaacgtagagattcccagggatatttcatgaaacaaacacaacgtcatgacgcgattatcgagctggtaaaaaaacagggatacgtcagtaccgaagagctggtggagcagtttgccgtcagcccgcagactattcgtcgcgatctgaatgatttagcggaacaaaaaatgatcctccgccaccacggcggcgcggcgatgccttcaagctcggtcaacacctcgtggcacgacaggaaagcgacccagacggcggaaaaagagcgcatcgcgcggaaagtggcgagcgaaatacccgacggcgcaaccctgtttatcgacattggcacgacgccggaagcagtggcccatgcgttgctcgatcataatgacctgcggattgtgaccaacaatctcaacgtcgcgaatacgctgatggtgaaagacgattttcgcattatcctcgccggtggcgagctgcgtagccgcgacggcgggatcatcggcgaagcgacgctcgattttatctcccagttccgcctcgacttcggcattcttggtattagcggtattgatagcgacggctcgctgctggagtttgattaccatgaagtgcgcaccaagcgggcgattatcgaaaactcgcgccacgtgatgctggtggtggatcactcgaagtttggccgtaatgcgatggtgaacatgggcagcattagtatggtcgatgcggtttataccgatatcatgccgcccgcaggcgtgctgaaggtgattaaagacaacaacctgcagctggagctgtgctaaacggcgttatacgccgtatcccatcattttgagcaaccgctgggcatgctgaacggcatcctggcggtgcgcgacgcccagtttctgatatagattgcgaatatgcgttttaatcgtggtggccgcgacatccagttcgccggcgatctgctcgttgctgtaaccggaatagataagccctaacacctgccactcgcgctgggtcagcggactggtgcggataagctccggcacttccgggtggttcagcagccgttcgacgaagctctcgtcgaaatgggcgaatttatgtcgatgatgctggttaatatcgcgcaggatacgctgggcgcggtgctgctccagctccggcagcgtattcagttgaatcagttggcgcagctgctgggccatggcttcgccttcaatcacgaagtggttgataaagccggtgcggttagcgagggttaaagcttccattaacactttttgcgcctcgcccttgcgctccgcctgccagtacagctggttcaacagtagcaggttacggttgatatcgctcatcagccgcagcgagcgggcattttcatttaactcttccagcaccatttcggcggaatcaaaatcaccgagaaggatctgtgcgcgggcaatgttgcgccactggctttgcaggaagtggttattggcgaattcaggtttcggcgtctggcgcagccagttggccgctgcggttttatcaccggtcatctgccagtagatcacccgcactttgtcggcgttagagacccaatcgctgtgatagtggccgttgcccagcagattttccaggcggtttaataagctgcgggcgttgtcgagatcgccgcgcgccagcgagcactgcaccatcaacgccaggcactgcaactgctgctgcggctggtagtttgccagcacagcgatgccgctgcgggcactttcttctgcttcatcaagacgcgcccacgcccacagcagctgcgcgcggatgcgcaacaggaactcatgcatcggcagctgttcaagatgctgatcgcggataagctggaaagctttatcctgaatctcccatgccgcctgcaggaagccctgggcaaacagaatctcgctctgctggatcatgctccacagggcgtagtgccagacgtcatgacggcgagccatctgttctgtttgctgcatcaccgccagcgatttgctcaggtggcctttgcagtgcagcacttcgccgtgaacggaagtggcgacgatgcggctgtaatagctcgccagcggcagttcatccagcgccaccattgccagacgctcggcttcgtcctgatcgccggcgttgatagcgacctgcgcgcgcagggcgttgaaatcgccgtgcatcgcggtatccatttcgacatccatctcctgctcggcgcgggccagcagggtattcacttcgctatagcgatgctggctctgcatcagccaggcctgtaacaggatcagccgcgggttttccagcaggttcgaccacggcagcgccgccagcgattgttccagcagacccagctcactatggttgaacatgccccaggcgtggttgagcaaaatatcgcgcagcatggcggcatcgccagcggcaagcgcatgatggatggcttcggtggggaatccctgcgccatccacgcttcggcggcggcgcggtgaatttccggtagctcggtggccatttcccactgacagcgctggcgcaggaagttgccgaatagcgggtgatagcggaaccactcgccggagtcatccatccggtgcaggaacagcccctgacgttcgatctcttccagctgcatctggccgttctcttcgccggtgacgcggacgataagcgcgtcattcatcgagcgcagcagcgagctttttaacaagaagctgcgggtacgggcatcgacgttatccagcacttcatcgaccagatagtcggaaaggtggctggcgttaatcccggcgagacgacgggcggagtgctgggctgaggtgtttttctgccgggcggagagggcgatgagctgcagggcggtggcccagccggcgacgtcatcgcacaggcgactgctgtcatcggcttcaatgggggaggcgaggcggcagtcaaagaactgtttcgcctcctgatgagtaaaagccaactgttggctgccgatttccagtaactgctcgcgcacccgcagattggcgatccccaactgcggcaggttgcgcgacagcactaccagcgtcatggtctctggctgatggcgcaagaagaagcgcatggcatcgtggatcaccggattggtaatcaggtgataatcatcaatgaccaggtacagcgggcgctgccagtcggcaagctcaataaacagctgcgcaaacagcgacggcaggctggcgtactggcgcttttgcaccatggcttcgctggcggcgcagtggccgcctgtcgcctgttgaatcgccgcaatcagatagctggcgaagcgctcttgttgattatcgccttcatcaagcgaaaaccagccaaggtcatgcttacccgaagcccactgcgaaacgagcgtggttttgccgtaacctgccgggctggtcaccaacgcgagacgataattgttcgcgccggaaagtttcgccagcaaccgttcgcgaaccacagtgtgttcaagacgggatggacgacttaattttgacggaatcaacatagttcactttttcgctgtgcaagaaagggatggggattttttttgcgcttcgtaattaatgactcctaaggtcggcgataatgaaagttattgcaagttatgtccaaaattgatgctcttgaatttgctctcggtcacaatttctcgcttcggtttttaattagctttaaaccggtaccagaacgcgtcatgcctcggtttacgacgatttcgtccgggacgaaattactttacccggcattttttgtagttgattgtttttattaaattatcgtcagtggattcttaggtttaatctatttcacgtatttttgtcatggcatctttttattctgtcagtagtttattttttatttcacgataatggcctgtgcgaattttgctttgcgctatgaattgcgctgtaacaaatttgccgttcgttgcgctggcgaaattattgttctacacgcgcaatagggcggcgaattcccgtcgacgagctaacgttaaagtggccgcgatcacaattttcgctcatccccgctactcctccctgtctaatccccctcgggaggaggcagcggcctcgggaggtcggcacactaaggctaacgttttagtaaaggaccaggatttcttatgtcacagacttcttttaaccaggctcagtttcaggctgcactgacgcgtcagtggcagcgtttcggtttatcgtcagccgcagagatgacccaacgccagtggtggcgcgcggtcagcggcgcgctggcggagcttttggcggcgcaaccggcggcggaagccgttaaaggacagcgccacgttaactacatttcgatggagttcctgatcggtcgcctgaccggtaataacctgctcaacctgggctggtatgaaggagtgagcgagacgctgaaggcgtacgacatccagttgaccgacctgctggaagaagagaccgatccggcgctgggcaacggcggcctgggccgtctggcggcctgcttcctggattctatggccaccgtcggccagtcggcgaccggttacggcctgaactaccagtacggtctgttccgtcaatccttcgctgacggtcagcagatggaagcgccggatgactggggacgcggcagctatccgtggttccgccacaacgaagcgctggatgtgcaggtgggcatcggcggtaaagtcagcaaaagcggcgaatggcaaccggctttcgtgattaccggcgaagcctgggatctgccggtgcttggctatcgcaataacgtcgcgcagccgctgcgtctgtggcaggcgaagcatgcccatccgttcaacctgaccaaattcaacgacggcgatttcctgcgcgcggagcagcaaggtatcgacgccgaaaaattgaccaaggtgctgtatccgaatgacaaccatctggcggggaaaaaactgcgcctgatgcagcagtacttccagtgcgcctgctcggtggccgatattctgcgtcgtcaccatctggctggccgcaagctgcatgagctggcggattatgaagtgatccagttgaacgacacccacccgaccatcgctatcccggaactgctgcgcgtgctgcttgatgagcaccagataagctgggacgatgcgtgggccatcaccagcaaaaccttcgcttacaccaaccatactctgatgccggaagcgctggagtgctgggatgagaagctggtcaaggcgctgctgccgcgccacatgcagataatcaaagagattaacgacagatttaaactgctggtggagaaaacctggccgggcgataagcaggtgtgggcgaagctggcggtggtccatgataaacaggttcgcatggccaacatgtgcgtggtgagcggctttgcggtgaacggcgtcgcggcgctgcactccgatttggtggtgaaggatctgttcccggaatatcaccagctgtggccgaacaaattccataacgtgaccaacggcattacgccgcgtcgctggattaaacagtgtaatccggcgctggctgccctgcttgataagacgctgaagaaagagtgggccaacgatctcgaccagctgatcaaactggagaagtacgccgacgatgccaaattccgtcaggtttatcgtgacattaagcaggcgaataaagtgcgtctcgctgagttcgtgaagcggcgtaccggtatcgacatcaacccgcaggcgatttttgatatccagattaagcgcctgcacgaatacaaacgccagcacctcaacctgctgaatattctggcgcagtataaagagatccgcgaaaacccgcaggccgaccgcgtaccgcgcgtcttcctgtttggcgctaaagccgcgccgggctactacctggcgaagaatattattctggcgatcaacaaggtggccgaggcgatcaataacgatccgctggtgggagataagctgaaagtggtcttcctgccggattactgcgtatcggcggcggaaatgctgatcccggcggcggacgtctccgagcagatttccacggcgggtaaagaggcctctggtaccggcaacatgaagctggcgctgaacggcgcactgaccgtcggcactcttgacggcgccaacgttgaaatcgccgagcaggttggcgaggacaatatctttatcttcggccataccgtggaagaagttaaggcgttgaaggcgaaaggctacgatccgctgaaatggcgcaagaaagataagctgctggacgcggtgctgaaagagctggaaagcggtaaatatagcggcggcgacaaacacgcctttgatcagatgctgcatagcctgctgcaaggcggcgatccgtacctggtgctggctgactttagcgcttacgtcgcggcgcagaagcaggtagacgaactgtatcgcgaccaggaagcctggacccgtgcggcgatcctcaacaccgcgcgctgcggcatgttcagctccgaccgctctattcgtgattatcagcaacgtatctggcaggcaaaacgctaaggacaggcctatggagaataaacgccttgataatgccgcgctggcggcggggatcagccccagctatatcaacgcgcacggccagccgcagtcgatcgcggcggccaccaaacaacgtttgctggatgctatgcatcgtacgtctactgccgcgaaagcggcagtagaaccgctgcccagcgtcaaggtttttactcacggtaaaaaaatgcagttgccggtagcgggaagcggcgcgtttcactggctgctgacgaccgaagaaggtaagcagtatcagggtgagacgcgcggcggcgaaacgctcgctttgcctgggcgattgccgacgggctatcacaccctgaccctcacgcgggacggcgaacgctggcactgccgggcgatcgtcgccccggcgcgttgctacgaaccgcaggcgctaaaagagggcaaaaagctatggggcgcctgcgtccagctctacaccctgcgttctgagaacaactggggcattggcgacttcggcgatctacgcgccatgctgccggaaatcgcccgtcgcggcggcgcgtttatcggcctcaacccgattcacgcgctctatccggcgaacccggagagcgccagtccgtacagtccgtcctcgcgccgctggcttaacgtcatctatatcgacgttaacgcggtggaggatttccagcgtagccctgccgcgcaggcatggtggcagcttgcggaaacccagcaggccttgcaggccgcgcggcagaccgctgatgtcgactataccgctgtcaccgcgctgaagctgaccgcgctgcgtctggcgtgggccgagttttctacgcgtgaagataagcaaatggcggagttccgtcagttcgtgctgcgcgagggcgaaagtctctactggcaggcggcgtttgatgcgctgcatgcctggcaaagccgtcaggatccgatgcgctggggctggccggcatggccggaagcgtatcagagcacgagcagcccgcaggtgaaaaccttctgtgcggagcatgccgatgaggtgagcttttatctatggctgcagtggctggcatatacgcagttcgccgcctgttggcacaccagccagcaggacgggatgccgattggcctgtatcgcgatctggcggtcggcgtcgccgaaggcggatcggagacgtggtgcgatcgcgagctgtattgcctcaaggcttccgtcggcgcgccgccggacatcctcggcccgctgggacagaactggggcctgccgccgatggatccgcatgtaatggttgcccgcgcctacgagccgtttatcgaactgctacgggcgaatatgcaaaactgcggcgcattgcgtattgaccacgtgatgtcggtgctgcgtttgtggtggataccgtatggcgaaaccgccgaccatggcgcctatgtgcagtatcccgtggatgacctgctggcgatcctggcgctggagagccagcggcaccgctgcatggtcattggcgaagacctcggtaccgtaccggttgaaatcgtcggcaagctgcgcaaaagcggtgtttactcgtataaagtgctctatttcgaaaatggccctgataaaacgttccgcgcgccgaaggcttatccacagcagtcgatggcggtcgcaacgacccacgatctcccgacgctgcgcggctattgggagagcggtgatttgacgctcgggaagacgctgggtctgtatccggatgaagtggtgctgcgcggcttatatgccgatcgcgaacaagcaaagcaggggttgctggatgcgctgcatcggcacggctgtttgccgaagcgcgccggacataaagcctcgctgatggcgatgacctcaacgctcaatcgcgggatgcagcgctacatcgccgacagcaacagcgccctgcttgggctgcagccggaagattggctggagatggcttcgccagtcaacatcccgggcaccagtaccgagtatcccaactggcggcgtaagcttagtgtgacgctcgagcagatgtttgccgatgcgcaggtgaataagctgattaaagatctggataagcgccgcaaagcccgctaatccagagagaattccccggtggcgctgcgcttaccggggctacagttgagagccgaagaacaaaaagggaacgaggattacaccgccatccccaggaccgtaggtcggataaggcgttagccgccatccgacaaaaaacggcaccgcgggtagcccggataaggcgctttgcgccgctatccgggaaacgaagaacaaaaaaggccggggcgcatgatgcgcacccggccttttttatctcagggagagagggttacaccaccatccccagcagcagacaaccaaccaggccgcacacggaaatgatggtttccagtaccgaccaggacttgatggtctcgccaatggtcaggttgaaatactctttgaacagccagaaacctggatcgttcacgtgggagaagataacgctaccggaacccacggcgataaccattagctccgggctaacgccggtggtggcaatcagcggcgcggcgataccacctgcagtgatagcggcaacggtagctgagcccagcgcaatacgcagcaccgcagcgatagaccacgccataaacagcggtgacatattggattcgtgcatgatagaagcgatgtacttatccatgccgctatccaccagcacctgcttgaaggcgccaccgccgccgatgatcaacagcatcatggcgatgattttgatagaggaggtcagcgtatcgttgatctgctccatggaacggccgcgattgaggccgaaagtgaacagcgcgatcagcaccgcaatcagggtcgccatcaccgggtcgccgaagaactcggcaacgggcaggaaggcgtggcccttcggcagaaccatctcggcgacggcgcgcatcgccatcaggatcaccggtaccagagaggtccagacgctgacgccaaagcccggcatctcttcttcagtgaaggttttcgggttgtgcaggccttccgggatcggtttatcaatacctttcaggaaacgggcgaaaaccgggccggcgagaataaccgtcgggatagccagaattgtcccgtagagcagcgttttgcccatatcggcgtggaaaattgtcgcgatagcggtcgggcccgggtgtggcggcaggaaaccgtgggtgacggagagtgccgcggccatcggtacgccaacgtacagcagcgggatacgcgcggaagcggcgatggtaaagaccagcggcagcatcagcacgaaaccgacttcatagaacagggcgaaaccgacggtgaaaccggtcagtacaacggcccattgaatatgttttttaccgaatttatcaatcagggtagtggcgatacgctgcgcgccgccgcagtccgccagcattttaccgagcatagcgccgaagcccatgatcagtgcgaggctgccgagcgtgccccccacgccgtttttgatggatacgatgactttatccagaggcataccctgcattaatccgacggcgagcgccaccagaaccagagcgatgaagccgttcattttgaaacggatcatcagcaacaataacagggcaaccccgatagctacgatgactaatggcatgatttacctggccttaacttgttatgggtaacgttaaagtctgaacatctacagtatccgttccgcagaggaacaaggatgtcttgcaccgtaaagctggcttattcctgacccagagaaaggatagctggctatttttttgtcggtggtgcttgctgtggatgatacgggtaacatgtgagctttgagaatgccctgcgcggggtaaattttaaatatgagacttaagtcatactctctgccgggtttttgccgtgatggctagtcagaaatgttgtgcggtaacatgctgaagggagaagtcgcccggcaaacggattgttgccgggcgagagggggaagcttagtagtaggagtgctcgccgcgctggtgttcggtcagatcgcgcacgcctttcagctccgggaattcgttcagcagctgcttttcgatcccttctttcagggtcacatcgaccattgagcagccgttgcaaccgccgccgaactgcaggatagccagaccgtcttcggtgatttccatcagcgaaacgcgaccgccgtgaccggccagctgtgggttgatctgcgactgcagcaggtactccacgcgctccatcagcggggcatcgtcggaaaccttacgcattttggcgttcggcgctttcagcgtcagctgggaaccgagctggtcagtgacgaagtcgatttcagcatcttccagataaggtgcgctgagttcatcaacatacgcggtcagctgttcaaatttcagcgccgtgtcggtgtcttccaccgcatccggtgggcaataggatacgccgcactcagcgtttggggtgccgggattaatcacaaatacgcgaatttgcgtcccttcttcctgatttgccagcagtttggcaaagtgcgcttgtgcagcatcggaaatacggatcatagcgttggcctaatagttgactattttactgggttataatacgcccatcagcgggggtctacaaggtacggcacaaacaccatacctgaaccgtcgcggcgccgtttcgcaaaagcaggcgggaaatctcggcgacggtgcttccggttgtgacgacatcatccacaatggcgatatggaggccccgaacggataattcaacctggaaagcatttttcaggttctgcttacgtaatctggcgcttaactgatgctgcgttgcggtacgccggcttcgcgtcagcgcatcgccgcgccaggcgcagcccatccagcgcgccagcggacgacatagcgcctcgctttggttaaatccccgacgccaatgacggcgctgccacagcggcacgctgacaatccgatccactggcggcagcccgcaattaaggcgcaggcgtaaaagaagcagtcgcgccagcgccgccgagagttccggatgacgggcaaacttaaactggtgtaccagcccgcttagcggtggggcatagctattcaccgtcaccagccgctgccagggcggtggtttttgcaggcagcgtccacagggcaaggcgggcgccaatgccggtaaaccgcactgcgggcagagcgatggcgtgacgagcagcgaggcggtgcagcgcgagcacatcccccagtgagccatggccagcggcatttggcatagccagcataagctgtgtgctgttagcataattcccctcatagtgatggaaagagaacagtaactgatgaatgacatctggtggcaaaccacgggcgaaggaaattgtcatcttgtgctgctgcacggctgggggctgaatgccaacgtatgggattgcatcacgccggaactggctacgcattttacccttcacctggtggatttaccgggctatggccgcagcggtggttttggcgccttaacgcttgaagagatggcgcagcaggtcgttgaaaaagcgccggagcaggctatctggcttggctggagcctgggcgggctggtagcgagcctggtggcgctgcagcacccgcaacgcgtgcaggcgctggtgaccgtcgcttcttcgccgtgttttggcgcgcgcgaccagtggccggggattaaaccggaagtgctgagcggcttccagcaacagctgagtgaagatttccagcgtaccgtcgagcgttttctcgccctgcaaaccatgggcaccgaaagcgcgcgccaggacgcccgggcgctgaaaagcaccgttctgtcgctgccgatgccgcctgctgaggttctcaacggcgggctggaaatcctcaaaaccgccgatttgcgtcaaccgctcgccgcgctgaccatgccgtttttgcgcctctatggccgactggatgggctggtgccgcgtaaaatcgttcctcttttggatgagcagtggccgcaaagtgagtctgttgtcttcgaaaaggcggcccacgcgccgtttatttcgcatccccagccattctgtgagcctctcatcgcgctgaaaaaccggctgaataattatttttagcgctgcgtggtaaatcatcaggatcgggcaatacttaggttgttgcggtggttgattatttcgtttttgccgccgcaaactaaaaataacaaccttatggagagtaaaggctatgaaacttgttacaggtattgttgcatctctggtgataggctccctctcttttggcgcgttcgcggcgaaagagattcaaaaagatgaagtcgcgaagatgaatctgaccaaggtcggtagcatcacgacttcccgtaccacgtcgccgatggacgcgaagcgcgatctgtcgaagaaagcggatgagttgggtggtaagtacttcgtagtgattgccggcgagaagaacgagaagacggttcacgcgaacgccgacgtgtataagtaagcctgattttccctgccagcgctgcgcctggcagggcttcaggtagcccggataaggcgcaacgcgccgccatccgggatgtcttattcagcgcaaagaccaccactcccgcaggcaggctttcccttccgggcagcttttacagctgccggaaaggcagccatcggcatcttcggtcatcttgaccgcttttcccatcgcttccaggcggcttaacatggcgtcgatcagcggccgtggcgtatgcaggcgggcgctcagctgtgcagcttccatgcgcccctgcagggccagcatatcgcgaacgtcaattaacgatgccatgatgagaactccttagtgacagtctccggccggactctggcagcaggacgtcggggttttacgcgtcgccaacagggaaacatccacccggctacgcgcccgacgcaacaggccaaagaccacgacgttaaacagaattaccgccagaatacacaccaggctgtagcgcgggtgttggctaaagctcacggtctggtagtacagcgtcgatagcgagtaggcgatattcaacccccacaacaccgagaacatcatccaaccgcggctggactcgcgggcaatcgctcccatcacggaaatgcatggaatatagagcaggacgaagatcaggtagctgtacgcggcggcggcgctgccgaatttactgcccatcacccccatggcgccggtttccatttcgccatcgcctttgcttgcttcaatcgggttcgccagcacgctcaggctaaaggtgtctttcagcccctgccaggtttcatcgacggcggctaacagctcgtcgccaaggctaaactcctgtgggttaaactcttcattctggatatcttccgcggtgtagagggtgttcaacgtaccgaccaccacttctttcgccatcgcgccggtaaacaggccgacggttgcctgccagttatcttcatgcacgccaatcggcttaaacactggggtgatcactcggctaaccgaagccagcgccgagtcgttgatgttatcgaccactttgccgctaagcgagaagctgttcagcgcgctgaggaaaatactgacaatcacaatgaccttaccggcgcgcaggacgaagcctttcaggcgctgccaggtctggataaccaggctcttgatgtgcggtacgtgatacaccggcagctccatcacgaacggcgaggcttcaccgcgcataatggtgtatttgagcatcaggccggtgaggatcgccatcacgatgcccagtacgtacagtgagaagaccgccagcgcgccgttctggccgaagaaggcggcggcaaagaccgcgaaaatcgccaatcgggcgccgcaggacataaacggcgccatcatgatagtcatcagccgttcacgcggcgcatccagcgtacgggcgcccataacggaaggcacgttacagccaaaaccaacgatcagcggcacgaaggatttccccggcaggcctaacgcctgcatcaggcggtccattacgaaggccgcgcgcgccatatacccggagtcctcaaggaaggagaggaacaggtacatcatgccgatttgcggcaccagcggcagcacggtgttgataccgccgcccagcccttgcgcgaggaatacggtcagccagtccgggaagtgcagagtgtagcccagccactggatgccgtgaatgaaaatagccaccgaaccggcgtcgaaaatcggctgcagggcgccgccgatgttgatagccagcaggaacatcaggtacatcacgaacaggaagatcggtaagccgaggaagcggttaaggataattttatccatcgccgtggtgaagcggctcggctcggcggtcagggtgttactgacggcatcgcataccgcggcgatactttgatagcgggcatcggcgatatacagcgccggatcgtccatctcgccgctcaggttggccagcgccagatccagtttgtcggcggcgttgccagcaaaggcgcggctataaatatcgccttccagcatctgcagccccagccagcggcgctgacgcagcggcatatcatcaggcatcgcctgcgccagcatatcggcttcgcgctgcagagattgcggatagtgcaccagttccagcggctgattttgctcatggcggtcaagcgccattttcagcgcttcgatgccgcgaccgcgggtggagaccagcggaatcaccgggcagccgagacgggccgccagcgcgtcgacgtcgatgcggatttgctgtttttcggcaatatcgagcatgtttagcgcgacgacgcagggaatacccaactccagcagctgcagggtcagatagaggttacgttccaggttcgaggcgtcgatgacgttaatcagcaggtcggcatcgccgctgagaatatagtgacaggcaatttgttcatcgagcgatgtttgcgaggagatggtggtcagcgaataggtgcccggcaggtcaaccagagtaacctggtggtcggtggtggtgaaggcgccttctttacgctcaacggtgacccccgcccagttacccacccgctggcgcgcgccggttagctgattaaataacgttgttttgccggaattaggattaccaattaaaccaacggttaattttttcatttttcagactcttagtgccgggtcaggtgttattgcgcaaccgcttccagttcaattaacgctaggtcttttttacgtaataccaggcccacgcgccgggtctcaatatgaataggatcgcccagcggcgccacgcgcacgacatgaaacgaagaaccgggcaacattcccagggagagcagtttctgccgataagccgggctaatatcgcgggaaaaaccggtgattttccacgcactatcaggagtgaattgcatagggcctacttgttatcgctaaccgaaaagagaatttccaggcacggctattaaagcggcgctggggactatagccaacgaagaagaataaaacttaactgataacgatgataatgagaatggtttgtatcatcaatacatggcatggataataaatgcgtttttcatgggtatttgcttattttttgatatgacgcaagaacgtctctgtagccaaaaataagggaaaaattaatttcttcacttaatgtttaataaaggtttcattggttaacagaatgaaactttataaatttcgaacttattgaaaggttactggaatatattaatcgaggctcaggcattaaaaagcggaaaattgcccctcgaagaggggcagggaaggattagcgttttttgcccatcgcggcggccagcgcatccatcatcgcgctgttgccggctggctgagcatcgcgaccgcgcggcttcgccgcttttgccgccgggcggttaccctgcgggcgatcgttgccgccgccgcggcgcgtgttgctgtcgcccggttgttcatcgaggcgcatcgttaacgcgatgcgtttacgcggcaggtccacttccatcaccttcactttgacgatatcgcccgctttgaccacggtatgcgggtcttcaacgaacttattcgacagcgaagagatgtggaccaggccatcctggtgcacgccgatatcgacgaaggcgccaaagttggtgacgttggtgaccgcaccttccagaatcatccccggcagcaggtcgttcatcgtctcaacgccgtcggcgaactgggcggttttaaactcagggcgcggatcgcggcccggtttttccagctctttgatgatatcggataccgtcggcactccgaacttatcatcggtaaaatcagaggctttcaggttgcgcagctcgctgctgttgcccatcagatctttcagcgcctgctgggtagcggccagaatacgctcgaccaccgggtaggcttccgggtgaacggtcgaggcgtccagcgggttgtcgccgtggttaatgcgcaggaagccggcgcactgttcaaaggcttttggccccagacggcttaccttcagcaactgctggcggttgtggaactggccgttctcgtcgcgccaggcgacgatattctgcgccatcatgcgggtcaggccggcgacgcgggtcaacagcgccaccgaggcggtgttaaggtcgacgccaacggcgtttacgcagtcttctactaccgcatctagcttacgcgccagctgcgtctggctaacgtcatgctgatactgaccgacaccgattgatttcggatcgattttcaccagctcggccagcggatcctgcagacggcgggcgatagagaccgcgccgcgtagggaaacatcgaggtccgggaactcctgcgccgccagttcggaagccgagtagaccgacgcgccggcttcgctgacgatcaccttctgggcggtcactttcgggaactgtttttgcacgtcgaggaagaaacgctcggtctcgcgggaagcggtaccgttgccgatagccaccagctcaacgttatgtttttcgcacagcgccgccacgacgacggcggctttagccgcctggccggtatgcgggtagatggtatcggtggccaccagtttgccggtgccgtcgactaccgccactttgacgccggtacgcaggcctgggtcaagacccatggtggcgcgcaggccggcaggcgcggccatcagcaggtcatggagattacgggcgaatacgttaatcgcttcgtcttccgcgcgttcgcgcacggtgcccattaattcggtttcgaggtgcatcagcaccttgatgcgccaggtccagctgacgacgcctttgcgccagctgtccgccggggcgttattcaggcgcaggccgagatgatcgataatgatctgctcgcagtggctctctttcggcggctcatcaaactgcgggtcggcgttgagcgacagctgcagcacgccctcattgcgcccgcggaacatcgccagcgcgcggtgcgacggcacggaagcgatcggttcatggtggtcgaagtaatcgcggaatttagcgccttcttcttccttgccgctgacgacgctggccaccagatgggcgtttttccacagataatcacgtactttcgccagcagggcggcgtcttccgcgaagcgttccatcaggatatagcgcgcgccgtcgagagcggctttgctatccgccacgcctttatcggcatcgatatagtttgccgcttcggtttccggatcgtgggaaggctcattccacagcagatcggccagcggttcgagaccggcttcaatggcgatttgcccgcgggtgcggcgtttaggtttgtacggcaggtagagatcttcgagctcggttttgctgagggtggcgttgatggctttttccagcgcttcgctgagcttgccctgttcgccgatcgatttgaggatcgcctggcggcggtcttccagttcgcgcagatacccgaggcgagtttccagattacgcagctgcgtgtcatccagaccgccggtgacttccttacgataacgtgcaataaacggcacggtgttcccttcatcaagcaggcgaacggcagcttctacctgttcggctctggcctgaagttcacccgcaataatgcggcagagcgaatcattcatcatcggttttattcatcattagggtcaaaaatcaggggatagttatacgggctgccaggctaaaatgccagccgcgaccgggttctctcggaatgttccggcgctatttcacgtattcaatttcattgacgtaccagctggcttcgcccgctggagtgttaacgatagccaggtcgcccacctctttcttcagtaaagcgcgcgccattggcgaatcgatggagatatagtctttgcggccgaagatttcatcgtagccgacaatgcgaaagcgcttggtatcaccatcgtcgttctctatttccacccacgcgccgaagaacactttgccttcctgctgcggggaataatcgacgattttgagattttccagacacttggtgagataacgcacccggcggtcaatttcgcgcaggcgctttttattgtactgataatcggcgttttcactgcggtcgccaagactcgccgcccaggtcactttcttggtgacttccgggcgctctgtacgccacaagtaatccatctcttgcttcagtttttcatacccttcacgggtgatcagcggcgttttcatctgtggttcatccaaaataatctcgtcctgccgtaccttaaccagccgtttcggcaaggtaaagcggtgggcgcagaaatcgcggctactggctgcgggtaaaaatggtaatcacctgatcaatatgatttttcattgctttctttgccgcacggacgtcgtgggcctcaatggcttcaaggatcgcgcgatgctcctgttccgagcgatgcggcatatcgtccggcgtatagtggcgctgcagcatgcggaacatactgccgtagcggtggccgagcaggtggccgatgataaacgcgtacgccgggttgccgctggcctgagcgatacggatatggaacaggcggtcgccgggatgggtggtcgaaccggcgcggttatcgcgacagttttgctcaaaggcctcgcggatagcggccagctcttcggggctggcatgacgcgccgccagcgcggcggtttccggttcgattaacaggcgcgcctgcagcagagaaaagggcggtagttcggcgttaaaatcgaggtctatgttgagttcgtcgtcgatctccgtccactggtcgcgaccggcctgcgccatcaccggctctttggtggcgacgagcggcgtttgcgatttgacgattaccccgttgccgacgcgcacgtccaccaggccaatcacctccaacgcaatcagcgcttcgcgtaccgatgcgcggctgacgttcaattgctgggctaaatctcgctcagacggaagacgactgccgggcggaaattcgttgttctcaattaatcgcttgagttggtctgctatctgtctgtaaatccttgggttttccagtctggtaatcggcatgtttcacctttgctcatgcgatagacagtgataaagcgcacaaatattggccagcacacttgagtgtttgttagtcgagtgtaattaattggttaaccaatgtgccgtttgtggccgtttttgcaacatctaagcttcacgatagcgggttatgcctgacttgtcatgcgaaaggtcaggcctttgactaccaccaatggcctgaccattagtcctttagaccaggggagagaaatggaactaaccggaaaacgcgttctgattaccgccgcagggcaggggattggcaacagctgcgcgcggctgtttgccgccgccggcgcggaagtgattgccagcgatatcaacattgccggattgagcgatatccccggcgtacagccgctgcagctggatgtcacccgcgcggatgcgattgccgccgccgcggaaacgctgggcccgctggatgtgttgttcaactgcgccggggtggtgcatagcggcagcattcttgaatgtagcgagcgggagtggcagttcgccctcgatctgaacgtcaccgccatgttccacacgattcgcgcctttttgccggcgatgatcgcccgcggcggcggctcgattatcaacatgtcatcggtagcttccagcgtgaaaggagtaccaaaccgcttcgcctacagcgccagtaaagcggcggtcattggcctgacccgctcggtagcggcggatttcgtcacccagggcattcgttgtaatgcgatttgtccgggcaccgtcgattcaccttccctacgcggacgtattgccgagcaggcgtgcgagcaggggctgagcgaagaggcggtttatgaggcgtttgtcgcccgccagcccattggccgcatcggcaagccggaagagatcgcccaactggcgctgtacctggcttccgacgccagcgcctacaccaccggcacggtgcagattattgacggcggttggagcaactaaccgcgcggcgctttatttcactatcaggaaaacgcatgaaattacttcgttttggcaatcccggcagcgagcgtccgggcgtactcgataacgacggccgcctgcgcgacctgtcgcaatatattagcgacctgcgcggcgacgcgctgctgccggagagtctggcgcgtctgcgccagctggatctctacagcctgccgctggttgaaggcaatccgcgtattggcgcctgcgttggcggtatcggtaagtttatctgcatcggcctgaactatgccgatcacgccgcggagaccggcgccgatattccgcaggagccggtggtattcagcaagtggaccagcgcggtggttggcccaaacgacaacgtgattatcccgcgcggttcgcaaaagaccgactgggaagtcgaattaggggtagtgattggcaaaggcgggcgctatatcgacgagcgcgacgccatgcagcacgttgctggctactgcgtgattaatgacgtctccgaacgtgagtatcaaattgagcgcggcggcacctgggataagggcaaaggctgcgacacgttcgggccgacgggcccctggctggtcaccgccgatgaaatccccgatcccaacgcgcttaacctgtggctggaggtcgacggcaagcgctatcaggacggcaacacccgcaccatgattttcaaagtgccctatatcatcagctacctgagccgctttatgagcctgcagccgggcgatgtcatctccaccggtacgccgcctggggtgggtatgggccagaaaccgcagccggtttatttacgcgccggccagactattcgtttgggcattgaagggttgggcgaacagcagcagctgaccgtggaggacaaacaatgacgcaaattaccgccctgcgggtagaggatattcgcttccccacttcgcagcagttggacggctccgatgcgatgaatcccgatccggattactccgccgcctacgtgatcctcgaaaccgacaatcctaagctcaccggtcacgggttgaccttcaccattggccgcggcaacgaaatttgctgcgcggcgattcaggcgctggagcatttaatcgtcggcgagcaactcgagacgatcgccgccgatatgggcgccttctggcggcgctttaccagcgatagccagctgcgctggattggcccggacaaaggggcgattcacctggcgaccggcgcggtggtcaatgcggtgtgggatctgtgggcgaaggccgaaggcaaaccggtctggcgactggtcgccgatatgagcccggccgagctggtacgctgtatcgattttcgctacatcaccgactgcattaccccggaggaggcgctgcgcctgctggaaagccgtgaagagggcaaagcccagcgtctcgaacagctacaggcgcagggttatccgtgctacaccacctcagcgggctggctgggatacggtgatgaaaaactgcgtcgcctttgtcagcaggcggtggacgccggtttctcgcatatcaagctgaaggtcgggcgcgatattgaagatgatatccgccgcgtgcgcattgcccgggaagtgattggccccgagcggaaattgatgattgatgccaatcaggtatgggaagtggacgccgccattccatgggtcaaagcgttggccttcgccaacccgtggtttatcgaagagccgaccagcccggatgatatcgaaggccaccgcaagatccgcgaaaacatcggcgcggtgaaggtcgccaccggcgagatgtgccagaaccggattatgttcaaacaattcattatgcgcggcgcgattgacgtggtgcagatcgatgcctgccggttaggtggcgtcaacgaagtgctggcggtgatgctgatggcggcgaagtacaacctgccggtttgcccgcacgccggcggcgtcggactgtgcgaatacgtccagcacctgtcgatgattgactacctgtgcatcgccggtacccatgaagggcgggtgattgagtttgttgaccatctgcacgagcacttcctgcacccttgcgaaatccgcggcgcagcttatatgccgccgcaggcgccgggctactcgattgaaatgcatcaggcttctatcgagcagtaccgctaccgtggagaagcgcatgttgcgcattgacgcccaccaccactactggcgctatcagccacaggattacccgtggattgatgacgacatgccgcaactgcgccgggatttttaccctccgcagctccagccgctgctggcgcagcaccggctcgatggcgcggtggtggtgcaggcgcgtcatgatgaaaacgaaaccgcctggctggtggcgcaggtttctcaggcggttggcgtatgcggcgtagtgggctggctggatattaccgccgcggatctcgaggacaagctgacgcagtggcgcggccagctgtgcgggttgcgccatcaggtgcaggatgaagccgatccggcagcgtggcttgagcgcgaggcggtctcgcgaggaatgcagcagttgcagcgccagggctatagctgggatctacttgttacccatcgtcatctcgcggcggcggcacgctttgccgcccgccacgatgatcactggctggtactcgaccatttcggcaagccggatatcgcgcgcggcgcggcccattgggccgaacaggcgcggccgctggcggcgctaccgcacgtggcgcttaagctttctggtctggtgaccgaggccgcgggcggatgctggaccgagcagcaactgctgcctttcttcgacgccgcgctggagctgtttggcccgcagcggctgatgtttggttccgactggccggtatgcctgctggcggcggagtaccgccaggtttaccagctgtgcgaaacggcgctggccccgctgacggaaacgcagcggtcagctatctggggcggtactgcctgtcgggtttatggtttaacggaggcgaagcgtggatctatttcttaaagacaaagtggttatcgtcaccggcggcggctcggggatcggcgcggcggtaacgcaactgctggcggaagagggggcggtgccggtcatcgtcactaacgcccagccagagcaggggtttatggataggctgaagcaaatcgcgccgcaaagtgagctgattatcgccgacctgtgccaggaggctgaatgcgccggggcggtaggccaggtgctggcgcgctttggccgcattgatgcgctggtgaataacgccggagtgaacgatggcgtagggctcgaggccgggcgtgaggcgtttctcggatcgcttgaaaaaaacctgatccactactatcagatggcccacctatgccgcgaagcgttagaggtggcgcggggggctatcgtcaatatcgcctcgaaaaccgcgctcagcggccagggcggcaccagcggctataccgcggcgaaaggggcggtgctggcattaacccgtgaatgggcggtatcgctgcgcgagagcggcgtgcgggtcaacgcggtggtgccggcagaagtgctgacgccgcagtaccagcgctggataaataccttccctgacccgcagcggcagatggcggcgattaaccaacgcatcccgttgggcaaacgcatgaccacgccggaagagatcgccaataccgtggtgtttcttatctcctcgcgtgcgtcgcacactaccgggcagtggctatcggtggacggcggatatttgcatctcgatagggcgctgtcatgagcgttaccgccgcgcggcggcgactgtgtcaggcgttggatttggtcgattcggcggagaaaattgccgaataccagcgtctgcatgaacgtatctggccggaagtcgccgggcatctgcgcgcccatggcgtgctggatatggagatttaccggcttggcacgcggctgtttatggtgatggaggtcgccggggatttcgatggcgaacgctttgctcagcacagcctgaaccacccggtcattcagcgctgggaagcgctgatgtggcaataccaggttcccaccccctggacgccggcaggcgaaaaatgggtgtcgatggagcgcatattctctttgcaggatcaataaaacaactctgtactctactgaggatctcaccatgctagtgaataaaacggcggagccgctggcggcccgcgccggggcgacccctaatctgcgctgggcatttatgctggtcaccagcctgttctttatgtgggggctctcttacggcctgctcgatgttctcaataaacattttcaggagaccctgcacgtcaccaaagcgcagtccggtttactgcaggcggcctattttggcgcctacttcctggtggcgctgcccgccggctactttatggataaacgcggttataaagcggggatcctggtcggcttgtgcctgtatgcgcttggcgcgctgctgtttgtgccggcggcgagcgtgaatagctttgcgctgttcctgttcgcgctgtttgtgattgcctgtggattaggttgccttgagaccgcggcgaacccttatgcgacggtacttggcgatagtaaaggcgccgagcggcggttgaatctggcgcagtcgtttaacggactggggcaatttattggcccgctgatcggcggcacgctgttcttttcagctactcagggcgatagcggcgatcagagctcggtaaaaatcacctatgttgctatcgccgtgctggtgctggccatcgcgctgctgttccgccgcacgccgatgccggatattcgcgaagaggagggcagtcagcaagaagcggcgcaggggctgtggcagcatcgccactttaccggtggggttatcgcccagttcttttatgttgccgcgcaggtcggcgtgggtgcgttctttatcaactatgcgaccgagcactggcatggcgtgacaaaccagcacgcttcctatctgctgtcgattgcgatgattagctttatggtcggtcgtttcttcagtacctggctgatggggcgggtgcaggcggcgacgctgctgatggtgtattcgttggtcaatatcgtgctctgcggtctggtgatgatgagtatcgacggcgtgtcggtggtggcgctgattgcggtcttcttttttatgtcgattatgttcccgaccattttcgcgctgggcgttaaaaatatgggcagccataccaaacgcgccagctcgtttatgattatggccatcgtcggcggggcgattatgccttactttatgggggcgctggccgaccgctacagcaccgcgctggcctatgggttgccgctgctatgcttcctggtggtgctgtggtacggcatgagccaacgacgcgcgtaagcggcaaaattagctaaaaaggcggaggagaccctccgcctttttcttttttgtcgcgccggtggtaaattttgctcagaatgacgggtttaccctaaataattcgagttgcaggaaggcggcaagtgtgtgaaaccccaggagcatagataactatgtgactggggtgagcgcacgcagccaacgcacgtgcaacttgaagaatgacgggtataaattgctgtttaatatgctttgtaacaatttcgactagaatatataccagatttggctggtcgtattagcgtgggtttttaagaatacgcactaacgattgcagtgaacctttgggagtacaaacaatgcaagagaattataagattctggttgtggatgacgatatgcgcctgcgcgcgctgctggaacgttatctgaccgagcagggcttccaggttcgtagcgtggcgaacgctgaacaaatggatcgcctgctgacccgtgaatccttccacctgatggtgctggatctgatgctgccgggcgaagatggtttatctatctgccgccgtctgcgtagtcagagcaacccgatgccgatcattatggtgacggcgaaaggggaagaagtggatcgtatcgtggggctggaaatcggcgccgatgactacattcctaaaccgtttaacccgcgtgaactgctggcccgtatccgcgccgtgctgcgccgccaggcgaacgagctgccgggcgcgccatcgcaagaagaagcggtgatcgcttttggcaaatttaaactgaacctcggcacccgcgagatgttccgtgaagatgagccgatgccgctcaccagcggtgagttcgcggtattaaaagcgctggttagccatccgcgtgaaccgctgtcccgcgataagctgatgaaccttgcccgcggccgcgagtactcggcgatggagcgttccatcgacgtacaaatctcccgcctgcgtcgcatggtggaagaagatccggcgcatccgcgctacatccagaccgtttggggactgggctacgtcttcgtgccggacggttctaaggcatgaagcgcgtgcgtttttcgccgcgaagctcatttgcccgcaccctgttactgatcgtcaccctgctgttcgtcagcctggtgacgacctatctggtggtgctgaatttcgcgatcctgccgagcctgcagcagtttaacaaggtgctggcatacgaagtccgtatgctgatgaccgataaactgcagctggaagacggcacccaactggtggttccgccggcgtttcgccgcgaaatttaccgcgagctggggatttcgctctattccaatgaggcggcggaagacgcagggctgcgctgggcgcagcattatgaattcttaagccagcagatggcgcaccagcttggcgggccgaccgaagtgcgggttgaggtcaacaaaagctcgccggtggtgtggctgaagacctggctgtcgccgaatatctgggtgcgggtgccgctgactgaaatccatcagggcgatttctcgccgctattccgttatacgctggcgataatgctgctggccattggcggcgcgtggctattcatccgtatccagaaccggccgctggtcgacctggagcacgccgcgctgcaggtcggacgtgggattattccgccgcccctacgcgaatacggcgcgtcggaagtgcgttcggtgacccgcgccttcaaccatatggccgccggggtcaaacagctggcggatgaccgtacgctgctgatggccggggtcagccacgatttgcgcacgccgttgacgcggatccggctggcgacggagatgatgggcgaacaggacggctatcttgccgagtcgatcaataaagatatcgaagagtgcaacgccatcatcgagcagtttattgattacctgcgcaccggccaggagatgccgatggagcttgcggatctcaatgccgttttaggcgaagtgatcgccgccgaaagcggctacgagcgggaaatcgccaccgatctgcaggccggagaaattccgctgcgcctgcatccgctatcgattaaacgtgcgctagccaatatggtggtgaacgccgctcgttacggtaagggctggattaaagtcagcagcggcagcgaagccagccgtgcctggttccaggtggaagatgacggcccgggaattaaaccggaacagcgcgaacatctgttccagccgtttgtgcgtggcgatagcgcccgtagcaccagcggcaccgggctggggctggcgatagtgcagcgtattatcgacaatcataacggtcgcctggagattggcaccagcgaacgcggcggcctgctgatccgcgcctggctaccaattccggtgcatcgcgcgctgtcgccggcgaagcctgcgaaagagagttgattagcgtataaaaataaaaaagccgggcatcgcccggctttgttgtctctgtgacctgattaacgcttcggaccggccgcaaccagcgcagcgccggccggggtatcggtatacttctcgaagttctcaataaacagtttcgccagctgatcggctttctcctgccactgctccggagaaccgtaggtattacgcgggtcgaggatatgggtatcgacgcccggcagctcggttgggatctgcaggttgaacatcggcagggtgaaggtttcggcgttatccagcgaaccgtcgaggatagcgtcgataatcgcgcgggtatctttaattgagatacgtttgccggtaccgttccagccggtgttgaccaggtaggcctgggcgccggaagcctgcatgcgtttcaccagcacttcagcgtactgcgtcgggtgcagcgacaggaacgcggcgccgaagcaggcggagaaggttggggtcggctcggtgacgccgtgctcggtaccggccagcttggcggtaaagccagacaggaagtggtactgagtctggtcagcggtcaggcgtgaaaccggcggcaatacgccaaaggcgtcggcggtcaggaagataaccttggtggcgtgaccggctttcgacaccggcttaacgatattttcgatatggtcgatcgggtaggagacgcgggtgttctcggtcttcgaaccgtcatcaaaatcgatggtgccgtcagcccgtaccacgacgttttccagcagcgcatcgcggcggatcgcgtgatagatatccggctcgttggcttccgacagcttaatggtcttcgcgtagcagccgccttcgaagttaaatacgccgtcatcatcccatccgtgctcgtcatcgccaatcaggcggcgtttcgggtcggtggagagggtggttttaccggtgccggagaggccgaagaacacggcgacatcgcctttttcgccgacgttagcggagcagtgcatcgaagcgatgccctgcagcggcagcaggtagttcatgatcgagaacatccctttcttcatttcgccgccgtaccaggtgccgccgataagctggatgcgctcggtcaggttgaaagccacgaagttttcggagttcagaccctgctctttccactgcgggttggtgcacttcgcgccgttcatgacgataaagtccggctcgaaggctgccagctcttcttcgctcgggcgaatgaacatgttcttaacaaagtgtgcctgccaggcgacttcagtaataaagcgcacgctgagtcgggtgtcggcgttggcgccgcagaaggcgtcgacgataaacaggcgtttgcccgacagctggtgagtcaccaggcctttcaggtgctgccaggtttcctgggagagcggcttgttgtcgttcttgccattgcctttatcagaccaccacacggtatcgcgagtggtatcgtcacggacgatatatttatctttcggcgaacggccggtgaaaatgccggtatcgacggcgatggcgccaagattggttaatacgccacgctcataaccttccagtttcgggtcgagctcttcctgatacagcgtatcgaagctcgggttgtggacaatttcctggacgtcattgataccgtaagccttgagatcctgcggggttaaactattaacgcgcatgtcactgctccttagccaatatgtactgctttaaattgtagggtttctttcagggaatagaccgcgaccaggctcatagatttacgtatctcgacaaacgcctttcttacgaaaaacacagtgactcctgtcacgaagtgcgcgtgattatctcaggaaaacggccggaggtggcgatagatgtttccgaatggttaaaaagtaattaaaaaaactgctgaaatgtgaatgtaatcgctttcttgaaagaaagttacgtaactctttcagtgaaaatcgattcaacacgcggtcgaaatagttgacgccaggcgcggcgggttagaaaaacccggcaacgcccggcgagaggggcgattagtgtacctgcggatccgccggcgaggcgttattgcggatctcggcgatatccatcgcgttgaacagataatgattgccgcagtagtcgcaatgcatatcaatttcgccttcgtcggcgaggatgctgtcgacttcttcatccggcagcgtcttcagcgcatcggcgcagcgctggcgagaacaggtgcatttgaactcgacgtcttgcgggtcgtataccgtcacctcttcctcatggtacaggcgccataatacatcggtcgccggcagggtgaacagctcttccgccttgatggtctcggtcagggtcgccagatgctcgaagtcgttaagctgcgcgtcctgagccggcatcacctgcagcagcatgccgccagccaccgctttaccgtcgtgctcgccggtacgaatgaacagtcgggtcggcagctgttcggaacgctggaagtaatcttccaggcatgccgccagggtatcgccttccaggccaacaacgccctgatagcgctcgccttcctgtggagagatggtaatgaccaggtagccgttgccgaccagcgttttcaggtccgcgccttccgggatttcgccctgaacgcgagcgacgccgcgcagctgctgctggttattgccgttgatcaccgccagcgagagcgggccgtcgccctgcagctgaacggtaatatcgccggcgaatttcagcgtggcggtcagcaggctggtggcgaccagcagctccgacagcacggttttcaccggttgcgggtagctatggttggccaggatctgttccaacgtgtccgatacggtgaccagttcaccgcgcacggcatagttttcaaacagataacgatgtaattgatcgtgttgagtcataatcatctctcttgctggcggcagcgctattcgctgtcgccgtgtttaaatctcatcaggtcgcggcgctcttttttgtccggacgtctgtctgggtgcggcatcgttagcgcattcagcttacgcgccagcgccactttttcgcgtttctcaatactctccgccgtctcttcgtacagcataacggcttcgctggctggcctgcgttgttcggtaacgcttttgacgataacggtacgctcgtcgttgccctgacgcagggtcagggtggcattcagctcgacgattttgctcggcttactacgttgtccgttgtagtgcactttgccgccttcaaccatctcgcgcgcgatggcgcgggttttataaaagcgggctgcccaaagccatttgtccagcctgacgctttctgcgggcttatctttcatggcctctcctccggagtcagggaagggatcagccgccggtaatcgttcacgccgggatggcgggtatactgtttttccgccaggccggaatccggattggtgacgcccaggcaataacgaataccgaactgcgccgccgcgtccaggatagcctcgctgtcatcgacaaacagcgttttgcgcgcatcaaggccggtttcttccgccaccgcgcgccacaggcgctgatcctctttcggataaccaaatgtgtgggtggaaagtaataaatcaaggtgcgcgtccagaccggtgtgcttgagcttcaccgccagattatgcgggtgcgcattggtcaacaggatgcggcgcttgctgctggcccgtagcgcatcaaggaatggcacggtatcttcccgcagttttgcccgcggcccttgctcgctggtcatcgcacaaatatccaaacccagtcgctcgctccagtaatcaagacagtaccagtttagcgtatgctgcacggcgtgatactcctgatgcattgccgctttggcttcctgcaggttgagtccgcgcgcggcgccccaggtttccgggaccagtttttgccagaagtagttgtcgaaggcgaggtcgagcagcgtgccatccatatccagcagaacggtatcaacctcctgccacgcgatattgatttgcatggtgagtctccagcgaggggggaaatgcgcgacagggtatcacaccctgccgcgcaggaattaatcttgatgatccggggaagggatgagaaccggattcaggcagctttcataatatttttgaatttcttccatgcgctgacgctggcgctgatagcggcggatcgcctgcacgccgtgccacgacatacagccaagcatcgccagcagcagcagagtggtgccaagatagcgccacagcccgctgcgatcgggaatgcggtgcaggttgatatgctgggtgccattggcgtcggtataaagattggtgacaatcccctccgcatggaatggtgtatgcatcagcatacccgccagacgctgtagctctccccactgctcgtgggcgggataatcgtacaggctgatagccggccacggctgattgaccagttcgctgccttcatcgctggcgatcaggaatccgccaggggccgggctatttaacgcctgcgccgcgcgggaggtttcacgcatcacaaacggcgcggttgaggtggtcaccagattctccagcgattcggcgctcaccggccgcagcaacacgtttaccccatcgagcttaccggcagtggcgcgtttggttagcgcttcccagttgcgggtattgccaaggttgaccagcgcgttcttcagacgcacgcaatcatctttcgccgaacagagctcgttggttttcagcacgatatcgccgaagtcatccagcagtaccattcctgatttttgaattgccgaacgtaatgccgggctaacgtgtgaatcgtcgtccgggtcaggatgcaactggcgctgtaccgcctggaccagcgccgtggctttaccgacgatatcggactccggcagcggcaggggaggcgcgtcgttccagatgatctgcgaacaatcgaacggcgtaaacggtgaggcttctttcgcgctccaggcgcccggcgtacggatgttgcacattccggtaccttttaactgcagcgtgtcgccgatgcggactttcgccttctcaagctggccgacggtggtggcttcgatggtctgcgcccccttaagccaggagagcgtgaatttaaagggcatattcagcgggacgctaatccacagcatgatgacgaccagcagcgcgccggcggcgataatcgcgctgcgtagccagtactgcagcgggaagtttttcacttcatcgtgcagcgacaggaagcgcccctggcgaaccacatggcggttaagataaatatcaatatcggtttgctgccccaggtcctgggcgatccacggttgccagtggcgcggatagataaggtcgataatccccagcgaaatattattgacgtgttcctgatcgttctcgccaaacagtccccagcgtttcggcattccgcgcaggcagtggatctcgcgtagcgaaccggccagcggcggcgcatagatgccccataagcccgctgccaacaacagtacgccgccgccgagcagccacggcgcaaagacgtcaggggagatcaggcagcaatagaacagcaggaaggctgcgacgatcataatcccttcgcgcaggctgtcaggacggctgagagcatgctcttcctgagtttcctggcggatgttcagcagctcgacctgctcgctctcctcaccgcgaatcgacgcctgggtagccgatgcgcgttcaagcgcgtagctgcgggcttcctgcggatagtcgcgcaaggtgtggtcattgagaacaatcaccagcggcaggctgtcggttgggatcagcgagacgctgttctcgtcgttgatatgctgttcccagaacggcggcaggtgaacctccaccgagtcgaggaagtatcgccatttgttgggctcatcagacgaaatgccatagcgggtgacggcgcgggtgacggtataaacggtgtcgctctgctcattcagtttcagggcgacaggcgcgacgctggcgccggtcgccggtacctgttgcgactggctgaggccatcgagatacttttcgaccgcctggcgttcatcatcagaaagcttgcgggtcgtcgcgtcgctaaaggcttgcagtaaggggaggcgacgacgtctggcatgagatcgataccaccacccgataagcaagacacagagtagcagagctgtgaaaaaggtcagaaaggtgcccatgcccatcccatcgtcatagtaattttaattgtttatcggcacatgttgtctaatgcaggaaattttattgtgcaatgcagcagcatgtaagcttatcaaaaacgggaaaactcaggaatcggtaaattctcaaaacaaattcaacctattgacttttttatctttatgaatctttgcattgcaagcaaaacgttgcaactatgtaaattagtggcaatttggattgccgaaaccgtgctgcgtatcgcacaatgacttctgtaatcacagcatagaccgatgacaatgagcaaatcattacaaaaacccaccattctcaacgttgaaacggtagcgcgttcgcgtctttttaatgttgaaagcgtggacctggagttcagcaacggcgtgcgtcgcgtttatgaacgcatgcggcccaccgcgcgtgaagccgtaatgattgtgccgattgttgatgaccacattattttaatccgcgaatatgcggtcggtaccgaatcctacgaattgggtttctccaaagggcttatcgaccccggcgagacggccatggaagccgccaaccgcgagctgaaagaagaggtgggtttcggcgcccgtcaattgaccttcctgaagaagctcagcatggcgccatcttatttctccagcaaaatgaacattatggttgcggaagatctctatccggaatcgctgccgggcgatgagccggaaccgctgccgcaggtgcgctggccgctgtcgcagctgatgtcgctactggaagaagaagacttcaatgaagcgcgtaacgtcagcgcgctgtttctggtgcgtgaatggctacaggcgcaggggcgtttgtaagcggctaactggaaacgtcgctggcgctttactgatggtgaggaaaacgagagttatgccaaacctggtaagtgaataattgaaacggttatacaagatactattatcagtttgcgattgattcggttcgggcaaaacggttgttttctgtcgcttccgaacacattgcgctcccgatttttcttctgctttatgtctctcatagcgcagggagcgcacagagggcggccagtcgccgccgccctctgtactcccgggctctggccgccaaaatcgccacttcgtggttccttcgacttatcccggcaggcttcgggtcgggccgaggcagagtccctgcaaatcacggccctcagcccgcatccatgcgggctgccccggccttccgggaacgtctcagcgattttgaggctatcagcaccggcagtttcatccagcgtggtgaagaaattaaaggctggtcgcacgaacggtaggccggataaggcgcagccgccatccggcaaaaaagccaatgtattctttgtcagcaataaaaaaactgcaccttacttcgttgggtatccaactttttgggtgcagttcatttcggtgttttttttgctgctctcaggccaccttttagaaggtggcttgcattagaacaactcgtgggtttcgccaccgctatcggtaatggtggtgccaacttcgcgcaccgcctgatgggtaggctgcgtgccctcgatgaagtactcggcgcggctgttgccgccgttagccagttgacctgtgctgcggtcgatattcaccgtcacaatacccggcggcggcgttaacggctcttccggcacgccttccagtacccgtttcataaaatcatcccaggccggttgggcgcttttagcgccgccttcataacccgaaatctgatctttaatcgcgccggaagcggtggtacggcccaaatcgcggcggtggtcatcgaagccaatccacaccgacgtcacgacgccaggaccgtagccggagaaccacgcgtcttttgagctgttggtggtaccggttttgccgccgatatcatgacgctgcaggtcgcggcccgcacgccagccggtgcccatccagcccggttcgccgaaaatattggtattcagcgcgctcttaatcaggaaggccaacggcgtgttgatgacatgcggggcatactccggcgcgccgctttgcgcgaccagcgactgattagcctgctcaagctgcggctgcggcggaacgtcgccgttttgcggctcctgagaggtggcgacctcttcaacatcctggttttccagcacattggatttcggcgtatcgccgtagatcaccggcgaattacactgcggacaggcgatcttaggccgctcttcaaacagcacgccgccctgatcgttctcaatcttgctaataaagtacggattaatcaggaagccgccgttggccattaccgaatagccgcgggcgacctgtagcggggtaaaggaagcggaacccagcgccagtgattcggtatggacgatgttctgcgccgggaagccgaaacgctgcagatactctgccgcataatcgacgcccattgcgcgcatcgcgcgcaccatcaccacgttcttcgactggcctaatccctgacgcagacgaatagggccggcgtactgcggcggcgagtttttcggccgccagtcggagcccgcgccggcatcccagcgggagatcggcacatcgttaagcatactggcgagggttaagcctttgtccatcgccgcggtataaaggaacggcttgatattggagccaacctgacgcagcgcctgggtagcgcggttgaacttactctgattgaagtcaaagccgccgaccagagcgataatcgcgccattttgcgggttgatagataccagcgcggagtttacttccggcacctgcgacagccaccatttgtcgccctctttgcgcacccaaatttgctgcccggtctgaatgacgtcggtcactttgcgcggcgtcgagccttgttgcgtatcggaaacgtagcgacgcgcccaacggacgccatccatcgttaatgccaccgacgtgccgttgcccagcaacgcgaccgcttcctgcgggttcgcggaggtgactaccgccggggctagcgggccgacgcccggcagttttttcagcgtatcgaggatttttttgttatcccacggggtctcgccaactttccacagcacattggccgggccacgatagccgtggcgcatgtcgtaatcgagcacgtttttacgcaccgactgctgggcggcctgctggtttttacgcgtgatggtggtgtagacgcgatagccgtcttcgtaggcctgctcgccgtagcggttgaccatctcctgacgcaccatttcgctcagatacggggcggagaaggcgatttccggcgtatggtagctggcgtcaatcgcttcgctgcgcgcctgatcgtactgtgcctgagtgatatagccttcgcttaacattcgcgacagcaccacgttgcgacgcgcggtcgcgcggtccagcgaatagagcgggttaaaggtggaaggcgctttcggcagaccggcgataaccgccatttcgctcagcgtcagctgatcgactgatttaccgaagtaaacctgcgcggcggcgccgacgccataggcacggtagccgaggtaaattttgttgaggtaaagatcgagaatttcgtctttattcagcagctgttcgatgcggattgcgaggaaaacttctttgatcttacgcgttatcgttttttccggactgaggaaaaagttacgtgcgagctgctgagtgatggtactggcgccctgcgaggcatggcctgagaacatcgccacgctggcggcgcggaaaatccccaccggatcgacgccatgatgctcatagaagcggctatcttcagtcgcgataaacgcttttatcagctccggcggcatctgctgcagagtgacggggatgcggcgcttttcgccatattgcgcaataagctcgccgtccgcgctatacacctgcatcgggatctgcaagcgcacatcctttaaggtcgcgacatcggggagttgcggctctataaatttgtagaggccataaatcgagcctgctcccagcagaacgcaacaaactgcaaggataaaaagatactttacgaacttcaccggagaattcccatttagttttatttgggcagtttataaacaaacgcgcggtagtataaaggcaagccaggagcattgatatacccctacggggcggcttgctggcgctatgctttccgggcggcgtgtcgatcgacgctaaaagcccccatttcgccacatggtatatccaggctgctccttgaatcgcaatcgcggataaggagatctaagcatgactttcagaaattggcgtataggaattcacattcaacaggatagcgtcgccatcgtggcgctgttgtacgaacgcgggcgctgggctttgcgtcgctggtggcgaattccgctaccgcccggcctggtggcgcagggcagcatcgttgaccttaatgagatggtgaagcggttacgtgaatggcgccgcgagctgccgttacagcatcaggtgtgcattgcgcttcctgccagccgtacgctgcaaaagcagttgcccgcgccacaggtgtcgctgcgggaaagcgaaagagcgacatggatagcgggcacgatggcgcgtcagctggaaatgcctgcctcttcgctgtgtatcgattacgccgcccgcgcggcaaacgatggctggcaggcgacggcggctcagcgtttggatatcgacgccctgcgtcagctggcgcggcggcttaagctgcgcctggcggctatcgtaccggatgcggctgctctcacttctttttttccctggcttactgacgagactcagggcctggtctggcagggggacgcgcagtggttatgggcgacccaggagcgctggggctattgtccttgcgctgaagccccctctttctcgcacttaacctcgcgcctcaatgatgaacagttccagctctgtagcagcctgccgttggcggaaaatagcttcgattgctggagcgcgatccaccgcctgcagccgccgcttcccgcctgcggcgatcgctttgctatcgcgcttggtttggcgctgggaggtaaataatcatggcgcagcagattaatcttctgccgtggcgcgagacgcgacggcggcaacgcttgcgcctgggcgggctgctggcggcggcgatggcgctaagcatcgccactctgacgatagcgacgcgcacgttacgtcagatggatgtggcgcagcaggtaatgcgcacccaggccgacaatctgctttattccgcgctgttgcaacgcgagcgggagatgcgtgaggaaatacagcgcggtgagcggcaggcacggcgagcgcagcggcgggcggcgacgcatgcctggcagccgcgactgttatcgctggctgcactattgccggagccgctgtggctgaccaggctggactaccagccgcagggaatcaccctcaacggcctggcgctgaacctcaaggcggtggcggcgctggaaaaagcgctcagcaagctggaggattttcaaccggttacgccaggggcgacgcggcgtgatgcacaggggcgctggtcattcagctttttccttgcaggagaaaccaccgatgcgggtagcgattgaacgcctgctggcgctgcgtgggtggtcgttgacgttactctgcggcgcagtgttggctgcggcaatatgtctggcgttttcgcttgctgctgtcagcgtttcacagccctcgaatgtgccgctacaggcgcaatggcggcgaatattgccgctgcgcgccacgctgcagcaacgggtagtccatagttggacggcccggcatttttcgccgctggagccgcctgtcgccggcgtcgccttacaggcctggcaaccgagggggcgcggtggcgaaatgcttgctgtggttgactggcaggcggtgccaccgctgtttgcctggcttgccgattgcggggtacacccaggcgctttttcattgaatgccgaaaaaggagcgttgcagttgtcgctgcagctggagagggacgatgaaacataaaggatacatgctgctgttggtttgtccgctgctgacaggggcgcgggatccttttttacccgtagaggatcgctgccagatcacgccactgacacagtggcgctacggcggcggaactggccacccggcgctgtggctggctcttattcaggatcacactggtcagtggcggcgtgtacgacgcaacgacgttttgcccggcggctggcgaattcgacagctaacggcagaaacattaactctggaggccagtgccgggtgtgaacccgcacgctgggtctggtcacgtaagggaagccaacatgatgcgaaggataagcctgctacttctgctgctgccgttgctggccgcggcgacgaaaaaagaaccgccggtgtcgctggtggttgatgatgtaccggtggtccaggtactgcaaagcctggcggaaatgcaaaatcttaatgtaatcgtggcgccggaggtcagtggtacattgtcgctccacttaaacagcgttccctggcgacaggcgctccagtcggttgtcgatagcgccgggctgacaatggcccggcagggcacggtgttgtacatccatacacaggcgtggcagcaagcaaaacgggcgcagcaggaagccgagcaggccagacgctggcagaatctgccattacgtaaccacagtatcccgctgcgctatgctgacgcagacgaactggcgaagtccgggggcaagctgttgagtgcccgcggcacgatgactgtcgatcggcgtactaatcgtctgctaatccgcgacgacgatcgtcatttgccggcgctgaaggcgtgggctgaagagatggatctgccggtcgggcaggtggaactggcggcgcacattgtgtcaatgagcgcgaccagcctgcgtgagcttggcgtgaagtggagcctggcggaggccagcagtacgccggggatggggaaaattactaatctgagcagcaatctggcggtgtcagacgcaaccacccgcggcggctttaatatcggccggatcaacgggcgattactggaactggagctttccgcgctggagcaaaagcagcaggtggacatcatcgccagcccgcgcctgctggcgtcgcatatgcaacccgctagtatcaaacagggcagcgaaatcccctatcaggtctccagcggagaaagcggcgccacctcggtcgagtttaaagaggcggtcctggggatggaagtgacgccgacggtgctacagcaggatcgcgttcgcctgaagctgcgcattagcgaaaatacgccaggccaggtactgcagcaggagaatggcgaagcgttggcaattgataagcaagaaattgaaaccttagtcgaggtgaaaagcggcgagaccctggcgctgggcggtattttttcgcaaaagaataagtcggcgcgcgacagcgtgccgttgcttggcgaaatccccttgctcgggcagctgtttcgccatgatggtaaagataatgaacgacgtgaactggttgtcttcatcacgccgcgtattctggcagtacattaagcgggtttttcatgctaaacacgtttcaggtgtttgacgcggggacggatttagcatacaaggggtaccgatttgagagtcgggtacgacatcaatcctccctttatgtccggcgattttattctgttgccaaaccagccggagtattgagataatttttagtctgactctcgctctattgcatatgaggtttcagttcatgtcctgctgcgctgggtgtctgcgaagcgggtttatcattaacgaatagtcttagtagtaccgaaaaaatggcagagaaacgcaatatctttctggttgggcctatgggtgccggcaaaagcactattgggcgccagttagcccaacagctcaacatggaattttacgattctgatcaagagattgagaaacgcactggcgcagacgtcggctgggtcttcgatgtcgaaggcgaagaaggcttccgcgatcgtgaagaaaaaatcatcaatgagttgacggaaaaacagggaatcgtactcgccactggcggcggctcagtaaaatcccgtgaaacgcgtaaccgtctctccgcccgcggcgtggtggtctacctggaaacaacgatcgaaaaacaacttgctcgtacgcagcgcgataaaaagcgtcctttattacaagtagatgcgccgccacgtgaagttcttgaagcgttggcagatgaacgtaatccactgtatgaagagatcgccgatgtcactatccgcaccgacgatcaaagcgcgaaagtcgttgcaaaccagattattcatatgctggaaagcaactaattctggcttaataaagtgcgtcagagtaaagcaactgaggtggacgtcgcgttatggagaagctgactgtaactctcggggaacgtagttacccgattaccatcgcggctggtttgtttaacgatccagcttcttttctgccactgaaatcaggcgaccaggtcatgctggtcaccaatgaaacgctggcgccgctttatcttgataccgttcgctccgtactggagcaagcgggtgtcaacgttgacagcgtgatcctgccggatggcgagcagtataaaagcctggcggtgatggatacggtatttaccgcgctgttgcaaaaaccacatggccgcgacaccacactcgtggcgctcggcggcggcgtggttggcgatttaaccggttttgccgctgcgagctatcagcgcggcgtacgttttattcaagttcccaccacgctgctttcgcaggtggactcttcggttggcggcaaaacggccgtaaaccatcccctcggtaaaaatatgattggcgccttctggcagccggtttccgtggtcgtcgaccttaattgtctcaaaaccttgccgaagcgtgagctctcctccggcctggctgaggttattaagtacggcattatcctcgacggcgagttcttctgctggcttgaagacaacatcgatgcgctgatggcgctggatgaatcagcgatggcgtactgtattcgccgttgttgtgagctaaaagccgaagttgtcgctgctgacgagcgcgaaaccgggttacgtgctttactgaatctgggacatacatttggccatgctatcgaagctgaaatgggctacggtaactggctacatggcgaagctgtggcggcaggaatggtcatggcggcgcatacgtccgagcgtttagggcagtttagcgcgcaggatacgcagcgtatgattgcgctgttgcaacgtgcagggttgccggtacgcgggccgcaggaaatgtctgccgaagcgtatttgcctcacatgatgcgtgataaaaaggtactggcaggcgaaatgcgcctggtattaccgctcgctataggaaagagcgaggtccgcggcggagtgtcgcacgatgtagttcttggcgcgattgctgatactcagcaggcgcaacaataagaaggtctagccgcgtccgcgcggcgttatcatttcgggcaacatgcaataatcgtgagcataagccttttagtggggtgttaaatggatgatttcaaaccagaagacgatatgaaagccgatcgcaacgatcgtcgtgctggtcgttcccgtcagtcttccgagcgtgacgccgatccgcagatcaatttcgacgatctcgatcttgaggccgatgaaggccgtccgacgcgcgcgaacaaagcccgtcgtgaacgcgatgaagaagagtacgaagaggacctcgagtccgaagaagaagtagaagaagagcagcaggttgaacgccgcccgcgtaaacgcaaaaaggctcctgctaagccggcttcccgccagtatgtcatgatgggcgtcggggtgctggtactcctgctgctgattgtcggcgtgggttcggcgctgaaatcgccatcttcttccaatgaatccgcttctggtgagaagagcgttaacctgtcaggcgatcaaagcatgaccgctgaccagaacaacaatgccgcgcagccggtcgatcaaactgcgggcaacaccaaccagcaacagccgcaggacgtttctctgccgccgatcgcctctaatccgactcaggggcaacccgcctccgagccgcagggccagcatcgtgtggaagttcagggcgatctgaacaatgcgctgactcaacagcagggtcaactggatagcgccgttgctaactccaccttaccgaccgaacctgcgaccgttgcgccgatgcgtaatggcgccgcgccgcgtcaaacgaccgaacgccagacggccgccacgccgcgtcctgccgagcgtaaacaggtggtgattgaaccgaaaccgcaaagcaagccgcaggctaccgccaaagcgccggttgaaactaagcctaagcacgtagaaagcgcgccggcggctaccgccagcaagcctgtcgccactgcgcagactaaacctgctgcgacaaccgcgccaacggcgactgcgccggccgcaacgacctccgccccggcagccaccgcgcctgcggcgaccgcagcggctggcagcaaaacggctggcgatgttggttcgatgaagtctgcgccgtctggcaactatacgttgcagctcagcagctcctctaactacaacaacctgaataactgggcgaagaaagagaagctggaaaaatatgttgtctatgagacgactcgcaacggtcaaccgtggtatgtgctggttagcggcatctacgcttcaaaagatgaagcgaaacgtgccgtcgccacgctccctgcggatgttcaggcgaaaaatccatgggcaaaaccgctgcaccaggtacaagctgacctgaagtaatgccgcgagtagtcttaagcgcaggatgctgtcggagcgatttctccacagccggagaaagtgtaattagttaggcagcatgaaaaagaatcgcgcttttctgaagtgggcaggggggaaataccccctgcttgacgatattaaaaagcatttgccggaaggtgaatgcttgattgagcccttcgtgggcgccgggtcggtattcctgaataccgacttttctcgttatattctcgcggatatcaatagcgacctgatcggtctgtataacatcgtcaaattgcgcaccgacgaatacgtcagcgcggcacgtgagatgtttacgccggaaaataacgccgcggagcgctactaccagtaccgtgatgaattcaaccagagtcaggatcccctgcgtcgcgcggtgctgttcctgtatctgaatcgtcatggctacaacggcctgtgccgctacaacctgcgcggcgagttcaacgtgccgtttggccgctacaaaaagccctatttccccgaggctgagctctatcacttcgccgccaaggcgcagaacgccgagttttactgcgaatcttatgaagagtgtatgaagcgcgccgatagccgggcggtagtctattgcgatccgccgtacgcgccgctgacggcgacggcgaattttaccgcctaccacaccaacagcttcaaccttgatcagcaggtactgctggcgaaaaaggcggaatcgttgatgaaaaagcggatcccggtgcttatctcaaaccaccgcacgccgctgacgcaggagtggtataaaaacgcggcggaaacgcatattgtgaaggttcggcgcagcatcagcagcaatggtggtacgcgtaaaaaggtggacgagctattagcgctgtaccgtccaccgaagaccaaataaatttcaaggagatgcggatgaagcagtatttgattgccccttcgattctgtcggctgattttgcccgtttgggcgaggataccgctaaggcactggcggcgggtgcggatgtcgtacacttcgacgtcatggacaaccactatgtgccgaatctgacgattggcccgatggtactgaagtcgctgcgcaactacggcattaccgcgccgatcgatgtgcacctgatggtaaagccggtcgaccgcatcattcctgattttgccgaagccggcgccagcattatcactttccacccggaagcctctgaacacgtcgaccgcagcctgcagcttattaaagagcatggctgtaaagcggggctggtattcaacccggcgacaccgctgagttacctcgattatgttatggataagctggatgtgatcctgctgatgtcggttaacccaggctttggcggccagtcctttattccgcacacccttgaaaaactgcgtcaggtgcgtcagcttatcgatcaatccggctacgacattcgtcttgaagtcgatggcggcgtgaaagccagcaatattggtgaaattgccgccgccggtgcggatatgtttgtcgcgggttcggcgatcttcggccagccggactacaaaaaagttattgatcaaatgcgtagtgaattagcgaaggttagtcatggataaattacaggccatccgcggcgtggcattcgacctggacggtacgctggtcgatagcgcgccgggtttaaccgccgccgttgatagcgcgctttacgcgctggaactgccggtggcaggtgaagaacgcgtcgtgacctggattggcaacggcgcagacgtcctgatggagcgggcgctgacctgggctcgccaggagcgcgccacgttacgcgcggcgatggggaaaccttccgtcgacgatcatgatataccgcaagacgaacagctacgcgttttgcgtaaactgttcgaccgctattacgccgaagcggcggaagaaggcagtttcttgttcccggcggtggccgatacgctaggcgcgctgcatgccaaaggcctgccgctggcgctggtcaccaacaaaccaacgccgttcgtggcgcccttgctcgaggcgctggatattgcgaaatactttagcgtggtgatcggcggcgacgatgtgaagaacaaaaagccgcatccggatccgctgctgctggtggcggaaaagctctctctgacgcctgccgaactcttgttcgtcggggattcgcgcaatgatattcaggcggcgaaagcggcaggttgccgctctatcggtctgacttacggctataactacggcgagccgatagcgctgagcgagccggattttatctttgaccaatttaatgaactcttgcccgctcttgggctaccgtacagtgaaactcaggaattaaaaaatgactaagcccatcgtttttagtggcgcacagccctcaggtgaattgaccattggcaactatatgggtgcgctgcgtcaatgggtaaacatgcaggatgactatcactgtatttactgcatcgttgaccagcatgcgatcaccgtgcgtcaggatccgcagaacctgcgtaaagcaacgctggatacgctggcgctgtatctggcctgcggtatcgatccgcaaaagagcaccattttcgtccagtctcacgtaccggaacacgcacagctgggctgggcgctcaactgctacacctatttcggcgaactgagccgtatgacccagtttaaggacaagtccgcgcgctacgccgagaacatcaacgccggtctgtttgactacccggtactgatggccgctgacatcctgctgtaccagaccaaccaggtaccggtaggcgaagatcagaaacagcatcttgagctgagccgcgacgtcgcgcagcgctttaacgctatctatggcgatatctttaaagtgcctgagccgtttattcctaagtccggcgcgcgcgtcatgtcgctgctggagccgaccaagaagatgtccaagtccgatgacaaccgcaacaacgtcattggcctgctggaagacccgaaatcggtagttaagaagattaaacgcgcggtgactgactccgacgagccgccggttgtccgttacgatgtgcaaaacaaagcgggcgtttccaacctgctggatatcctctccgccgtcaccggccagagcattccggaactggaacagcactttgaaggtaaaatgtacggccacctgaaaggcgaagtcgctgaagcggtttccggtatgctgaccgagctgcaggagcgctatcaccgtttccgcaacgacgaagcgttccttaatcaggtgatgaaagagggcgccgagaaggccagcgcgcacgcttctaagactctgaaagcggtatatgaagcgattggctttgtcgctaagccgtaataaggctcgctgaaggtaaaaaaaccgggattatcccggttttttttgtctctgtcagagcgtattagcttaatggtgagaaaaccagttcagcttgtcgcgtagcgccaccacgcggcccacgataatcaacgccgggctggccatctgctgcgccagaatatccagccgatccagagtgccggtgacgaccttctggttgaccgcggtgccgttttcgacgattgcggccggcatatccgccgccatgccgtgggcgatcagcttttcgcggatcgccggcgcctggtttagccccatatagaacaccagcgtctgtttttccgccgccagattttgccagtcgagattgataccggttttcagatgaccggtgattagacgtacgccctgggcgaaatcgcggtgggtaagcggaatgccggagtaggccgagcagccggaggcggcggtgatccccggcaccaccgagaacggaatacctgccgcgcatagggtctccagctcttcgccgccgcggccaaaaataaacggatcgccgcctttcaggcgtacaacacgtttgccgctttgcgcttcgcgcagcaggatttggttgatttcctcctgcggcacgcagtgatagcctgcacgtttgccgacaaacacccgatcggcgtcacggcgcaccaggttcataatgtcgtcggagaccagtcggtcataaaccactacatcggcctgctggatctgctgcagtcccttgagggtgagcagcccggcatcgcccggaccggcgcccaccagcaccacttcgccgcgatgttccagcggctcattcaataactgttccgtggtgtcggcaacggcctgacgatcatcgttcgccagcgattgggcgagacgatcgttaacaaacagtttttcccagaagcggcggcgctcgccgacggtagcgaactgttttttcacccttgagcgtagctgcccggcatagcgggcgatttgcccgaggtgcagcggcagcagcgattcgagcttttcacgcagcaggcgcgccagcaccggggaggtaccgccggaagacacggcgaccatcagcggcgagcggtcgataattgacggcatgataaagctggcctgacggggcgcatccaccacgttgcagaaaatacgccgtgattcagcggcctcgctgacctgctgattaacgacatcatcgtcggtggcggcgatcgccagccagcagttatcgagcagcgcaggattgaaatcgccctgcgccagcgtcagcatttgcgcctcggcccacacctgaaactgcggagtaaactggcgtgagttcaccgttaaccgggcgcctgcgtcgagcaacagacgagccttgcgttcagcgacatcgccgccgccgaccagcaagcagtcgcgatcgcgtagttggcaaaaaataggtaagtggtccacggcagatcctcacggcaaggggggaaagggagtgcggtcgtagcatagcagctgagggaatcacggagatatgaattttgccgcctctacttattagtggtcataagctgatgatatggttccccccgccgcgcggagggaaccttgcggcatcaggctttcagctgcactttgccatctttaacacgggcttcgtaatgggcgatggagtggctctcatcttccatgcatagcccgtcgctgaggcggaagcgctgctttttcagcgggctggcaacccacagcgcgccgtcatgctcagcgataatcccgcgggacagcacgctggcattgaagaacggatcgatattgctgatggcgaacactctgtcgtcatggtacggacggaagatagctacctgctgttgccccagcagcgcacagacgccggtcgccggcaggatgtcgtcaattttgcagatgtttacccactggctcatacgttttcctccaccagcgtgaccgggatgcgctcatagggcgtggccgggcgatgctggtcacgttccggcaccacctgaacgttcgggtcgcgctgatcgctgttgataaagtgtttgaagcgcgtctgtgccgccgggttattgacggtctcggtccattcgcaggcaaaagcggcgcgcaggcgagccagctcttcttcaaggtgatcgttcaggcccagtttatcgtcgatgatgacgctgcgcagatagtcgatgccgccttccatgttgtccagccacggcgcggtacgggtcaacttatcggcggtgcggatgtagaacatcataaagcggtcgagatatttgatgagcgtatcacgatcgaggtccgcggccagcagatcggcgtggcgtggtttcatcccgccgttaccgcacacgtacaggttccagcctttctcggtggcgatgatcccaacgtctttaccctgcgcttccgcgcattcacgggtacaaccggagacgccgaacttcattttgtgcggggtacggatgcctttatagcggttttccagttctacgccgaagccgacgctatcgccgacgccgtagcggcaccaggtactgccgacgcaggttttcgccatacgtaacgctttggcgtaggcatggccggtttcgaagccggcttcaatcagttgacgccagatttccggcaggtcgtctttttgcgcgccgaacaggccgatacgctgggagccggtgattttggtatacagattaaattcgcgcgcgatgcgaccgacggcaaccaggccttctggcgtaatttcgccgcctgcggagcgcgggataaccgagtaggtgccatctttctggatgttggcgaggaagttatcgttggtgtcctgtagcggcgtgtgctgtggtttgaggatgtactcattccagcaggaggccagcagggaaccgacggtcggcttacagacttcacagccgtagccctgaccgtgtttttccagcagttcgtcgaaggttttgatgccttccacgcggatcaggtggaacagctcctggcgagagtaggcgaagtgctcacacagattgttgttcacttcgataccctgtttcgccagctcggcgttgagcacctgcgtcaccagcggaatacagccgccgcagccggttccggctttggtttccgctttcagcgccgccacggtgtggcagcctttattgatagcggcgatcaggtcgcctttgctgacgtcgaagcaggaacaaatctgcgcgctgtccggcagtttatccacgccgatggacggcttgccgctgccggcgtgggccggaaggatcagcgaatccgggttttccggcagctcgatggcattcagcaccagctgcagcaggttgccgtaatcgctggtgtcgccgaccagtaccgcgccaagcagggttttgttatcttcgctgacaatgagccgtttgtagacctctttactttcgtcgagatagacatagctacgcgcgcccggcgtgcgcccgtgggcgtcgccgataccgccaacgtcaacgccgagcagcttcagcttggcgctgaggtcggcgccggtgaacagattgtcgttgccgaggatatggtcaacggtaacctgcgccattttgtagcctggggcgacaagaccgtatacgcggttattccagctggcgcattcgccgatagcgtagatatccgggtcggaggtctggcagctatcgttgaccatgatgccgccgcgttgggcgacggcgagaccgcactgggtagccagcttgtcgcgcggacggataccggtagagaagacgatgaaatcgacctgcagttcgctaccgtcggcgaagcgcatcgttttgcgtgcctcggtgccctgctgaacgatctctttggtgtttttgctggtgtgaactttcacacccatgctttcaatcttacgcttcagctgctcgccgcccatctggtcgagctgctcggccattagcatcggcgcaaactcgatcacgtgggtttccacgccgagatttttcagcgcgccagccgcttccaggccgagcagaccgccgccgaccaccgcgccgcgtttgctgcgacgggcgcaggattcgatggcgttaagatcttcaatagtacgatagacgaagcaatcctgggtttccgcgcctttaatgggcgggatccacgggtatgagccagtcgccataatcagcttgtcgtagaaaacggtacggccagcgctggagtggatcaccttttcctgacggttgatggtaatcgcgcgttcgccgaccagtaccttgacgccgtgtttctcatagaaaccttcgcgtaccagcgacagctcttccgcagtgtgatgggagaagtaagacgacaggtggacacggtcataggcgatacgcggctcttcacagaacacggtaatgtcgaattgtccggcaggcgccttatcaagaagctcttcgataaagcgatggccgaccatgccgttaccgataatagcgattctgactttgctcatttttgcctcgatttcttttctattaccgcctaccttaacgattcagctactacactcattgatacaaatcaatttagaacttacctaccacttaatgagtatattcatgatttataatgatttttctaagttgcggaaaaatcaggcttttccgttttgttctttttatgtacaaaggcagcggaagaaataagcaatgttcaggggagcagactatgtcgacaacgccgttgtggttaattcagaacgtccatctgccacagaaggaagggctgtggcagattgcgattgataaagggcgattcggcgacattacgccgatgggagaggcgcgcagcgagagctacgaagtgcttaacgcccgcggcggattggccatcccgccgtttatcgaaccgcacattcatctcgataccacgcagacggcgggagagccgaactggaaccagtccggaacgttgttcgaagggattgagcgttgggccgagcgtaaagcgctgctaagccatgaggatgtgaaagcccgcgcgtggaaaaccctgcgctggcaaatcgctaacggcatccagtttgtccgcacccatgtcgatgtttccgacccaacgttgaccgcgctgaaagcgatgctggaagtcaaacaagaggtagcgccgtgggtcgatttgcagatagtcgccttcccccaggaagggattttatcctaccccaatggtgagagtttgctggaggaggcgttacggctgggcgccgatgtggttggggcgatcccgcatttcgaatttactcgtgaatatggtgtggaatcactgcatatcgccttccgtctggcgcagaaataccagcgtccgctggatatccactgcgatgaaattgacgatgaacagtcgcgctttgtcgaaacggtcgccgcgctggcgttaaaagagggaattggcccccgggtgaccgcgagccacaccaccgcgatgcactcctacaatggcgcttatacctcgcggctgttccgcctgttaaaactctcgggcattaacttcgtcgccaacccgctggtcaatattcatctgcaggggcgctttgatgactacccgaagcggcgcggcgtgacgagagttaaggagctgatggcggccggcattaatgtctgttttggccacgatgatgtgttcgacccgtggtatccgttgggaaccggcaacatgctacaggtgctgcatatggggttgcacgtttgccagttgatgggctatcagcagattaacgacagtctgcagctgattacccacaacagcgccagaacctttgggctcaatgattacggcattgctaccggcaacccggccaatctggtgatcttgccggcggaaaacggttttgaagccgtacgctgccaggtgccggtacgttggtcaattcgtcagggaagggtcattgcgactacgcagctggcgcagacgtggatacagaccgataaaggcggcgaggagttgttttttaccaaaaatagcccctttgccgaagcaaaggggcctaaggcttagtgcgccgacgcgttctgacggtggcgggaaacgaagccaaggagcagacacatcacgaataccacggcatagaggccgttcgcggtgtgcagcgcggccagcgggccgctggccgcgacgatcggcccggtcaccacgaaggtcagcatggtgccgatagtgccgcaggtcagaatgaagttcaccagcttcggtgaagcgactttagtctgctgcgagcccagagtaatgatcgaggtatagatggcgctggagaagaagccaagggtcaggatgaaccacggcatatgctccggcgaaccgttaatgaacagatacatcaggactgtcgccaggcccgccagcacggtcaggatgcgctgcaggtcgaagaagcgcaggatgaagctgaacgaccacatgccgatcatataggacatccagaaatcgctgaccaacttaccggcgtcgccgaggctcatgccgaggcctttggcatattccggtacccaggagataaagcccaactggccgaggatgtagcatagcgcggcgatggaaaggaacagcacgccgatgccccatttctctttcactaccggctggctgttttccgccagcgctttgttgccaagcaccgggaactcacagccgaaagtcagcacgaaaatagcaacgtagaccaggccgatacaggcgtaaacccagtaccactcgatgctgcgcgctagcagaacggcggcgaccatcgggaagatcatccctgccatgctgaagaaggagtccgtgaacagcagacgcgcgccgcgctggcggccttcatacatgtgggtaatcaggaaagtaccgatcgacatggtgatcccgctgaccaggccgagcacgaacatcgacgcggagaacagcgtcaggctgtggccgaacatcagcccggcgatagctaacagcatcaggataaagccgaagcgcagctgggttttcagcggcacgatctccatcagccaggcattcaggaagatagaaatcagaataccggcattgaggaaggtaaaggtgttactcatactggacaccggcagatggaaataatccgcgatgttccccatcaccatcccggtgacgatcaccaacgcgccggtcagggcgtaggagaaaaagctgatccatgtgagcttgatacgattgctgttagtcatgacaggcctgtgaatagataggtaaagcgcgttgacgctgcgccgggcgcacagattttattcattcaagtgatgaaggcaaacgtttatattgaaatgtagagcttattgcatggttttgtgtgaccttgatcacactaataagattactcacccctgagtcagttcgtaacaagtgtttcagctaagtaaaattaggtaaaaggctagcccgctatgcaaaggctctttagaatcaaggcacttgctttttactctgctccgttaaggaatttccatgctcaaatccactctggcggcgatggctgccgtattcgccatttcagcattctcccccgccatggcggccaagggcgacccgcacgtactgctgaccacttctgctggcaacatcgagttggagctgaatagccagaaggcgccgatttctgtcgataacttcctgaagtacgtgaacagcggtttctataacaacacgaccttccaccgggtgatcccaggctttatggtgcagggcggcggctttaacgagcagatgcagcaaaagcagccgaacccgccgatcaaaaacgaagccgacaacggcctgcgtaatacccgcgggacaatcgccatggcgcgtaccgccgatcaggacagcgcgaccagccagttcttcatcaacgtggccgataacgctttcctcgaccacggccagcgtgattttggctacgcggtatttggtaaagtggtgaagggaatggacgtcgccgacaaaatttctcaggttccgacccacaacgtcggcccataccaaaatgttccgtccaaaccggtcgttattctctcggcgaaagtgctgccgtaatcttcttcaggcgcgggcggtccgcctgcgcccagcttgcctctctgcgtaacctgaaattgctgcttatacttgtggcacacaggggacgataagggaggcgaccatgcgtttactcaccgataaacaaaaatcccggctctgggaacagacccgcaatgccaattttcaggccagccgacgccttgaaggcgcgacggtaccgctcgttaccttgacggctgaggaagcgctggcgcatcttgccgagctgaggaggcgtcatgagcgctaaatatggcgacgatcgcgacccctatctctatccgacgctggatgtgttgcgtaatcggctgggtattcgtcaggcgcagcggctggaacaaacggcatgggaattcacttcgctgcgcgcggcgacgatcccgttgggcccacgcggccgcggcttaccgcatctgtgcgccattcaccggcaactttatcaggatctctttgactgggcgggcaaactgcgggaaatcgatatctaccagggcgatacgccgttttgccacttcgcgtggatagagaaagagggcaacgcgctgatgcgcaagctggaagaagaggactatctgtgtgaacaaccccgggagacgttcgtcgagcgactgagctggtactacggcgaaatcaatgtcctgcacccgttccgccttggcaacggcctgacgcaaaggatcttcttcgaacagttggccattcacgccggctacctgctcgactggcggggcatcgatccggatgcgtggagccaggctaaccagctgggcgcgatgggcgacccggaaccgctggagcggatctttcgtaaagtggtaagcgaagcgcgggaatctgagtagaatagcccggttttgttttttccggagccgctatgatcctgctaatcgataactatgactctttcacctggaatctgtaccagtacttttgcgaactgggggctgaggtgctggttaagcgtaacgatgagttaacgctggcagagatagcgtcgctggcgccggagaaaatcgttatttcgccgggcccctgcacgcccgatgagtcaggtatttcgctggacgttatccgccgctatgccggaaaaaccccgctgctcggcgtgtgtctgggtcatcaggctatcgcccaggtcttcggcgccgccatcgtacgcgccgctcaggtcatgcatggtaaaacgtcgcttattgagcacaacggcgagggcgtttttaaggggttaaacaacccgctcaccgttacgcgttaccattcattagttatcgacccgccaactcttcccgcggattttatcgttaccgcccgcagcgccagcggtgaaatcatgggtatccgccatcgccagtgggatctcgaaggcgtgcagttccacccggagagtattcttagcgaacagggacaccaactgctggaaaacttccttaaacgctgatttgtagttgccatgagttgatttattatgcatattttgtgattaaaacatcgcaatcattgcacgttacacagaaggatgggcatcacatggcaacagagcaaccggcaatcacccgcgccacattcgatgaagtcattctgccgatttatgcaccggcggagtttattccggtgaaggggaaaggcagccgcgtttgggatcagcagggcaaagagtacgttgattttgccggcgggattgcggtgaccgcgttgggccactgccacccggcgctggtggcggcgctgcacgagcagggcgaaaccctgtggcacaccagcaacgtttttaccaacgagccggcgctgcgcctgggtcgccaactggtggacgctacttttgccgaacgcgtggtgtttatgaactccggtacggaagccaatgaaacggcgttcaagctggcgcgtcattacgcaatcactcgccatagcccgtacaaaaccaaaatcatcgctttccataatgccttccacggacggtcgctgttcaccgtctcggttggtggtcagccgaaatactctgacggttttgggccgaaaccggcagatatcgtgcatgtcccatttaacgatctcgaggcggtgaaagcggtgatcgatgaccatacctgcgcggtggtggttgagccgattcagggcgagggcggggtgatggcggcgacgccggcgttcctgcaggggctgcgcgaactgtgcgaccagtatcaggcactgctggtatttgatgaagtgcagtgcggtatgggccgtaccggttcgctgttcgcctatatgcattacggcgtgaccccggatatcctgaccagcgcgaaagcgctcggcggcggtttcccgattagcgcgatgttgaccaccaatgaaattgccagcgccttccatgccggttcccatggctccacctacggcggcaatccgctggcctgcgcggtggcgaccgcggctttcaacctgattaacacgccgcaggtgctggagggcgtgaatgccaaacgggcgctgtttgtcgaacacctgcagcagatcgatgcgcagtttgatctgttcagcgacatccgcggcatggggctgttaatcggcgccgcgcttaagccgcagcatcatggacgcgcgcgcgatttcctctatgccgcggcggaggccggggtgatggtgttaaacgccgggccggacgtaatgcgctttgtgccgtcgctggtgattgatgatagcgatatcgccgaagggatggcgcgctttgcgcaggcggttaaaaacgtgcttagcgcctagtcgtgcgtagccagatgccgtgatgcggacgctgacgccatgccaccgacgaaatggtgtgcatggtgttcagatggccgaggatccgctgcagatgctgctcaagggtgctgagcggcccacgcaacacttccccgtcctgggattccataatatttacatcgcccgcgctgcccggcccgtctgaatccagacgctgctgacagcgctgcagcgcaatttcacaagattccagataccgctgcgccaggtcaggcgttagcatcgtatgctcgcgcgccagcgtggtcatggcgttgatatgctcaacgataaactggctatgggttacccacagcttcatatcttccagatagtgcgagttaaaacccggttcctgcatcgcctggttaagcgagttatacagggcgttgtgcgcctggttgacgcgcatacgctggtaggccaacgccggggcctgcggatcggcgctaagtatcagccgaatagcctcctgatcggcctccagggcatcgtgggcgtttttacgcagcaggccgctctgccattgcggccatagccagaccatcccgccaaaggcgatcagacagccaatgatggtatcgataaagcgggcgacgatgaactgctcgccgttaagcgttagcaactgcagggtatataccgcggtgacggtaaagcccaccatcgcccagccgtagtgtttacgaatgatgagatagctcagcagcgtgatgaacaacataccgcttaacgtatagctctccggtacgtggaagtgtaaggtcagccaggcgatcaccaggcccgccagggtgcctgccgcccggtggacaatccgcacgcgggtggcgccgtaaccgttttgcgtcacgaacagcacggtcatcaggatccagtaaggcttcggcaggtgcagggcgctgcccatcaggctggcgatgctcaacattacgctgatgcgcgcggcgttgcgcagcgccggggatttcaatgacaggtaattcttcagggccggtagcagcggcaggcgtcgttctttgtccgccatcaggttacgtgcgtacagcggtcgctgagtacgtagcacgcgggcgatacgactgaagtgccaggcgcagaactggccaactgggttatcgggatgctgataggcgattttttccagcgcgccgatttgcttatccatctgaaagcggcgcgggtagcggtggtagagaatatcatccgccagcacccgcagacgagcggcaacggtctgcgcgttccagcggatgaccgcttccgcatggctgcgctccaccagtttttgcacctcttccggctggtgcaggctcactgaaatatgttcctgcagatccagcccaacctggaacgcgcgcagcagtcgcttatgatcgctacgctggttggcggctaacatatgcatctgctgatagcactgggtaattaaatcgaccaccttctgctggcgggtaagcagcggcggcagggaggtcgtcgggtcagtgtgctgcgtcaggaggctatatttggcctcgcaatagttagccagttcgcggtaaagcaggcttaacgactcgcgcagcggctgctctcgccagagccaaaaccagaaccagttaaagagtccgtaccacaaggttcccagcgcatagataagcagcggctcccagatgggcatattgccggccaggcttaaggtaaaaatggcggcgataagcgatgccggcaacaggcgagcgtgtagcgagctgatttccgccgtcacgccgagaatcagcgccagcgcgctgaggataagcggcaacgggatgtcgcgcgccagaagcaattgcacaatcaggctgctgccggcaaacaggcagccgccaacgatcaggcgtttgaaaaaacgtttatgcggggtgtcgagaccggcaatattgcaacaggcgggaactaaagagaacagcagcccttgctgcagatggccgagcagaagcccgatggccacaggtagacacagcaccagcgtttgccgcagtgcatagttgacttccgggtggtaaatcagcctgcgccacatgggagaaacaaaaacggcgtactgcgcggagcaatacgccgtttagcgacttaacgggtaccgtagacgacgatagttttaccgtgtgcagagatcaggttttgatcttccagcatcttcagaatacggccgacggtttcacgagagcaaccgacgatctggccaatttcctggcgggtgattttgatctgcatcccgtccgggtgagtcatggcatcaggctgtttcgccagattcagtaaggtctgagcgatacggcccgtcacgtcgaggaaagcaaggttaccgactttctcggaagtgacctgcagacgacgcgccatctgcgaggagaggcgcatcaggatgtccgggttcacctggattaactgacggaattttttgtaagagatctcggccacttcacatgcggttttcgcacgtacccaggcactacgttcctgaccttcttcaaacaggcctaattcaccgatgaaatcgccctggttgaggtaagagaggatcatctctttaccttcttcatccttgatgagtacagccacggagccttttacgatgtagtaaagcgtttccgctttctcaccctggtgaatcagcgtgctctttgatgggtacttatgaatgtggcaatgagacaagaaccattcaagggtagggtctgtttgcggtttgccaagcaccatgcgcggttatcctctgttataagctatctccggacgccgacactacacggcatccgggcatgcaatcgtattttttccctatgcctgggaagctggctgctcaatttatgcagcctgtaatgtgaactcctcagcatacatgcggtacatcaatgtattactgtagcatccagactgttttagcatagctttcaccgcatgtctcctggtgtctcgcttcagcatgacccaggtcgccttccgttgccagatttgttatgtgcgcgtaatctgtcaggaaaattgcaacagcggagttaaattttatgcaagcgcgtgtgaaatgggtggaaggtctaaccttcatcggtgagtcggcctccggccaccagattttaatggatggcaactccggggacaaagcgcccagcccgatggagatggtgttaatggcggcgggcggctgtagcgcaattgacgtggtgtctatcctgcaaaaagggcgtcaaaacgtcactaactgcgaagtgaagctgacctccgaacgccgtgaagaggcgccgcgcctgttcactcatatcaatctgcactttatcgtcaccggtaaagagctgaaggatgcggtggtgtcccgtgcggtggatttatccgcggagaagtactgctcggtggcgttgatgctggaaaaggcggtcaacatcacccactcttacgaagtcatcgaagcctgaggcgaattgacgtagcgggacactaaccccggcagcacggcgaccggggttttattttgcccttaactaatggttttgccttccatcaagcgctcgaccagcggcgccataatgagctccatcgccagccccatcttaccgcccggcaccaccagggtgttcatatgcgagataaacgacccctgtagcatcgccaacagccagggataatcaatcccctgcaaattgcggaagtgaatcaccacgaagctttcgtcgagcgatggaatacctttggcggcaaacggattcgaggtatcgaccgtcggcacgcgctggaagttgatatgggtacgtgagaactggggggtgatgaaattgatgtagtcctccatcgaacgcaccactgagtccatcaccgcttcgcgcgaatggcctcgttcgctggtatcgcgaatgagcttctgaatccattcgaggttgacgatcggcaccacgccgaccagcaggtcgacatgtttcgccacgtcatgctgcggcgtcaccacgccgccgtgcagcccctcataaaacagcacgtcggtcggttcaggcagcggctgccacggggtaaaggtgccgggaacctgattccagggaaccgcttcatcataggtatggagatattttcgcgactggcccttgccgaattcgccgtactctaaaaaggtgcgttcaagcaggctgaagtcgttggcttccgggccgaagtagctgatgtgtttgccctgatcgcgcgctttgcggatcgccatgtccatttccgggcgagtatagcgatggaagctatccccttcgacctccgcggcatgcaggttcagttgcgagaaaattttgcgaaacgcgaggctggtggtggtggtgcccgcgccgctggagcccgtgactgcgatcactggatgtttggcagacataacaactccctgattaagtgatggtgtgtcgccgtatcgcgccaggctctcgcggttagaggggcatggcgcttagccgttaaacatcttgcggggcatgatgttgaccgtctcgtgcagttctgaccacaccagtacggcctccccggttttaagctgctgttttacatcggcgactttatcggcaagcgaacgttcatgttcaccataatcggtgccttcgcgcaacacaaagctttcaatcagattatccagcgtttcgggatcgagatcctgccagggaataatcatgcttgtcctcccagccagcgggttaaccaatccggaatacgttgctccagccacatttgcggttttcgcagcgtaccgccgacaaagccaacgtggccgccttgttccgtgagctgatattcgacattagccggcagctgttcctgcggcggtattgaatgatggtccataaatggatcgtcttttgcgtgaatgatcagcgtcggcttggtgatatcgcttaagcgcggcatcgcgctgcactgtcggtaatagtctagcgcatcggcgaaaccgtggattttggcggtgatcatgtcgtcgaattcgcggatgcggcgcatgcttttgagctggcgaagatccaccggcagcgagcctggataggctttcagcttgcgcgaggcgttggctttcagcaggttgagcaggtaacgctgatagacgcgcgaaaatcctttatccatatggtagctgcaggcttccagcataaagggcgccgagacaatcacggccgcatcgagcggaatattgtcgccttctttcgccagcagacagcccagcatgttgccgccaagcgaatagcctaccgccgccgtcggcgcggcgccgaattcacgccgcaaccagtgcaggaaccaggtgccgtcttccgtttcgccagagtgataaatacgactgttgcgattcggctcgccgctgcagccgcgaaaatgcatcaccaccccgagccagccgcgctgcatggcggcgtgaattaaaccgtgggcgtaagggctatgcaggctgccttccagaccgtgaaaaaccaccagccgcggtttgtggcgcgcgccagcagggtcttcgctccaggccagatcgacgaaatcgccatccggcagctcaagacgctgccagtgcggcgtaaatcggagcttgcggcggatgatccgcggcagcatggtttgcagatgacgattgcccacgccgcgcatcggatggaattcgcgcgaatcgttatcggggggcgtcactgctgtcggggttatttcaaccatagtaccaggattattaagaaacttttagaacactataccgcgcataaaagtgggcggttagccaatatgtggtcttgcgggtaatcggtatagattacatgaaaatgattcaagagaatggctgagcgatgaatttcggaaagtctcccgggatacttaagcagaaagtcccgacgatgaattttctctcaccgccgggcggttactcattaaccttcctgcagcatccgctccagctgttcctgcgcgtccagccacgccatttcacactcttcgagccctgatttggcgctcgcctgctgctgcaggcacgcggttaattccgctttgcgcgaggcgtcatataactcgctgtcgcccagtttctcttccgcctgcgccagctgcgcgttgagtttatccatctctttttccagccgggcgatctctttacgcagcggttgcgtttgcgtgcgcagttcggcttcgcggcgtttttgatccttacgcgcctgcgcgctattgccgttatccttcggcgcttcagaggcctggttttcctgcttctgcgaatcactcagccactgctgataatcttccagatcgccatcaaacggttcaactttaccgtcgtgtacgaggtacagatcgtcagtggtggagcggatcaggtgacgatcgtgcgagaccacgaccagcgccccttcgaagtcgatcagcgcttcggttaaggcctgacgcatatcaagatcaaggtggttggtcggttcatcgagcagcagtaggttagggcgctgccagacgattaacgccagcaccaggcgcgctttttcaccgccggagaaacggcgggtctcttcgctgactttatccccctggaatccaaagccaccgaggtagtcgcgcagtttttgttccagctcctgcggcgccaggcgggccagatgctgtatcggcgactcatcggcgcgcaggaattcgagctgatgctgggcgaagtaaccgagcttaatccctttcgccaggccaatttcaccggacagcggctgtaattcaccggccagtagcttaatcagcgttgatttaccggcgccgttgcgccccagcagaccgatacgcgaaccgggcaccaggttcagcttgatggagtcgagaataatccgttcgccgtagccggcgctgactttttccatcttgagtaacgggttcggcaggctttccggcgcgcggaagctgaagtggaacgggttatcgacgtgcgccggagcgataagctccatgcgctcaagcattttgatacggctctgcgcctgcttcgctttggtggccttggcgcggaagcggtcgatatagctctgcaagtgggctacgcgctgctgctggctttcatacatggcctgctgttgcgacagacgggtcgcgcgctggatttcaaacgagctgtagttaccggtgtattcgaacatcgtttgctgttcgatatgaataattttatcgacgatcggatcgaggaaatcacgatcgtgggaaatcaggatcagcgtaccggtatagcctttcagccatttttccagccagatcaccgcatcaagatcgaggtggttggtcggttcgtcgagcagcagcaggtcggaacggcagatcagcgcctgcgcgaggtttaagcgcatacgccagccgccggagaaatcactgaccgagcgctcaagctgctcgttactgaaaccaaggccgtgtagcaggctggcggcgcgggaacgaatcgtccaggcgtcaatggcatccagcttaccgtggacggtagcgatggcgtggccgtcgtcacgctcattggcctgctgtaaatcggcttccagcttgcggaactcgcgatcgccatcaataacataatcaatagccggttgcggcagggccggcgtttcctgattaacccacgccagctgccagttgctcgggaaggccatggagccgccgtcggcgcttatctcgtttttcaaaagcgaaagcaacgtagatttaccgcagccgtttttacccaccagaccgaccttctggccaggattgatggtggcggtggcgttgtccagcaggacgcgtacgccgcgacgaatttgtaacgaggagaaaacaatcataaggcgccgtatgttcagactatgttaatttgtctttatgataatgtagtgtggaagcgaaacgctccatagggccgcaatggtagcccaaaatgaagacgatagacaaagtcattctggttgcgtcgagacgcagccgcttcgcaagccgccagatgacgttcgggaggggaatgatgtctcagacagcgaaagtgttgctgctgtatgcccacccagaatctcaggattccgtggccaaccgggttttgcttgaaccggccttacagttgccgaatgtcaccgtgcacgatctttatgcgcactatccagatttttttattgatatcgcccatgagcaggatctcctgcgtcagcatcaggtgattgttttccaacatccgctgtatacgtggagctgcccggcattgttgaaagagtggctggaccgggtgctgagccgcggcttcgccagcggcgcgggaggaaatcaactggcgggaaagtactggcgtagcgtgatcaccaccggcgagccggagagcgcttaccgccgcgatgctaatcgctatccgatgaatgatattctgcgcccttttgagttaacggccggcatgtgccgcatgcactggctgagtccgattattgtctactgggcgcgccgacagcggccggaagatttgcaaagccacgcccgcgcatatcgtgattggctcgcgaatcctgttgctacaggaggcgtcaatggcgggagctgatttgctattagcgggggtactgtttttgtttgccgccgtggtggcggtaccgctggcggcccggctgggcattggcgccgtgctcggctacctgctggccgggattgcaattggcccgtgggggcttggctttattagcgatgtggatgaaattctccatttttccgagctgggcgttgtattcctgatgttcatcatcggccttgagcttaatccggccaaattgtggcaactgcgcaactcgatattcggcgtcggcgcggcgcaggtgctgtttagcgcggcgatcctcggcggattgctggtggtcaccgggttttcgtggcaggcggccgtggtgggcggtattgggttagcaatgtcctctaccgcaatggcgctgcagctgatgcgcgagaagggaatgagccgtaacgaatccggccagctgggcttttcagttctgttatttcaggatttagcggtgatcccggcgctggcgctggtcccgctgctcgccggacacggcgacgataacttcaactggatgtcggtggggatgaaggtgctggctttcgccggcatgctgattggcggccgttttctgctgcgtccggttttccgttttatcgccggttccggcgtgcgtgaggtatttaccgccgccacgctgctgctggtgctgggttccgcgctgtttatggacgccctggggctgtcaatggcgctggggacgtttatcgccggcgtgctgctggcggaaagcgaatatcgccacgagctggaaatcgctattgagccgtttaaaggcttgctgctggggctgttttttatctccgtcggcatggcgctgaatcttggcgtgctatatacccatctgttgtgggtcgcgctgagcgttgccgcgctggtggcggttaaagcgttggtgctttatgtattggcccggctatatggtttgcgcagctccgagcgcacgcagttcgccggcgtattgagccagggcggcgagttcgcctttgttctcttttccatgccggcttcgcagaagctgttccataacgatcaaatggcgctgctgctggttaccgtaaccttatcgatgatgaccacgccgctcctgatgaaggtcattgataaagtgctgtcgcgacggcttaacccggcggaggataccgatgaggcgccatgggtcgaggatgataagccacaggtgattatcgttggcttcgggcgttttggtcaggtgattgggcgcctgctgatggccaataaaatgcgtattaccgtgcttgaacgcgatatcagcgcggtcaacctgatgcgcaaatatggctacaaagtctatttcggcgatgcgacgcagcttgagctgctgcgttcggcgggggcggaagaggcgcagtctattgtgattacctgcaacgagccggaagataccatgaagctggtggagatgtgccaacagcattttccccacctccatattctggcgcgtgcgcgggggcgcgtagaggcgcatgagctattacaggccggcgtgacgcaattctcgcgagaaaccttctccagcgccctggaattggggcgcaaggcgctggtgaccctgggaatgcatccgcatcaggcgcagcgcgcgcagttacactttcgacgcctcgatatgcgaatgctgcgcgagttaatgccagtgcatactgataccgtacagatatcccgcgtgcgggaggcccggcgcgagctggaagagatttttgagcgtgaaatgcagaaagaaagccggcagctggacggctgggacgagtttgaatagaaggtagaacaaaatggcggtacgtaaacgttttattgccggcgcaaaatgcccggcgtgccaggcgcaggattcactggcgatgtggcgcgagaataatgtcgatattgttgagtgaagaggtccgcgagcacgttcgtaaagaagagcaagtgatcggcatttttcatccggactagcgttatctgtcgcctttttttaagctaaagggtacacggctgcagaattccgctacaatctgcgccactattcttcccatgctcaggagatatcatgaaagtagcaaaagacctggtggtcagcctggcctatcaggtacgtacagaagacggtgtgttggttgatgagtctccggtgagtgcgccgctggactacctgcatggtcacggttccctgatttccggcctggaaaacgcattaaacggccacgaagtgggcgacaaatttgatgtcgaagtcggcgcgaatgacgcgtacggccagtatgacgaaaacctggttcagcgcgttcctaaagacgttttcatgggcgttgacgaactgcaggttggcatgcgcttcctggctgaaaccgaccaggggccggtaccggtagaaatcaccgaagtcggcgacgatttcgtggtggttgacggcaaccacatgctggctggccagaatctgaagttcaacgtagaagttgtcgccctgcgcgaagccactgcagaagagctggagcacggtcacgtacacggcgctcatggccacgatcacgatcatgaccacggtcatgacggttgctgcggcggccacggccacgatcatggtcacgaccatgaacacggcaaaggtggttgcggtaacggtggttgcggttgccactaatggcgtcgcgttcgcgcgaatagccaaaaaagcggggaaacccgctttttttacgtctcaataatgcggaggcggcgtctcttcagactgtgacgcgatgtgcgacggctgtgtcgctttcaatttttcgatcatcaagcgcatatgttcgcgcattttggccatttctatttcatgcgccgtgacggttttgttgaggtcctcgatggtgatctcctgaaacgccagtcggctttccagttccgccagacgcgtctccattgtgctatcgttcataggtcgcctcttctgtcttgtttgcgggcggattctactcaagtttccgcgttaacgcagcatcgtaacgtcagagaggaaactaattcatacaaaaatagtctgaaatgaggcgatattcaggtaggtccgtatgtagatttgttctgcaacgttctatagtacgttttttgctttttatgataaccctggggtgagatgccccggccctggagaaatggatgaaatcactgtttaaagtaacgctgctggcgaccacgatggccgttgccctgaatgcaccgctgacctttgctgccgataccgcagcgaaagccgcaccggcggcggacagcaaatcggcatttaaaaatgacgatcaaaaatccgcttatgcgctgggtgcatccctcggccgttacatggaaaactccctgaaagaacaagagaagctgggtatcaaactggataaagaccagctgattgccggtgtgcaggatgcgtttgccgataagagcaaactgtccgacaaagaaattgaaaccactctgcagtcctttgagacccgtgtgaaaaccgccgctcagcagaagatggaaaaagatgcgaccgagaacgatgccaaaggcaaagcgttccgtgacgccttcgctaaagagaagggcgtgaaaacctctaaatccggcctgatgtataaagtcgagaaagccggtactggcgatgcgccgaaagacagcgataccgtcgtggtgaactacaaaggtacgctgatcgacggtaaagagttcgataactcttacacccgcggcgagccgctctctttccgtcttgatggcgttattcctggctggaccgaaggcctgaaaaacatcaaaaaaggcggcaaaatcaagctggttatcccaccagatctggcctacggcaaaactggcgttccgggtatcccggctaactctacgctggtattcgatgtagaactgctggatatcaaaccggctccgaaggctgatgctaagccagaagccgctgccgaagcaccggctgcagacgctaagaagtaatctgctataagccgccgccttcaggggcggcggcttttttattggctgtagatataattaaaactggaaaattcctcaggcgctgtattactttagatagcttaataatgatgatgagcctgccctgacgataacgacaggctcctgaaaaggagtgcttttttacatgtccaggtcgcttttaaccaacgaaaccagcgagcttgacctgctggatcaacgtcctttcgaccagaccgacttcgatatcctaaaatcctatgaagcggtggtggacgggttagcgatgctcattggttcccattgtgaaatcgtgctgcactcactgcaggatttaaaatgctccgctattcgtatcgctaacggtgaacacaccggccgccaaattggctcgccgattaccgatctggcgttacgtatgctgcacgatatgacgggagcggatagcagcgtatcgaagtgctattttacccgcgcgaaaagcggtgtgctgatgaaatcggtgactatcgccattcgcaaccgggaacatcgggtgattggtctgctttgtatcaatatgaaccttgatgttccgttctcgcagattatgagcactttcattccgccggagacgccggaagtcaattcgcaggtcaacttcgcctcgtctgtggatgatctggtggcgcaaacgctggagttcaccattgaagaggtgaatgccgatcgcaacgtatcgaataacgcgaaaaaccgccaaatcgtgctgaatctatacgagaaaggcatcttcgatatcaaagatgcgattaaccaggtagccgatcgcctgaatatctctaaacacacggtgtacctctacatccgccagtttaaaagcggtgatttccaggggctggataagtaatgcgttttgccatcaccgtaaccgggcctgcctacggtactcagcaggccagtagcgcgtggcagtttgcgcaggcggttattaacgcaggacatgaactggcctgcgtatttttctatcgtgaaggagtctacaacgccaatcagctgacggcccccgccagcgatgaggtagacctggtgcgtcactggcagcgcctgcatgatgaacatgccgttgcgctgcacatttgcgtggcagccgcgctacgccgcggcgtgaccgatgaacgcgaagcgcagcagcttggtttgccggcgcataatctgcagccgggcttcaccttaagcgggttaggcgcgctggctgaagcgtcgttaacctgcgatagaatggtgcagttctgatgaaacgcgtggctttcgtattttcttccgcgccgcacggcagcgcagccggtagggaagggctggacgccttactggcgacctcggccctcaccgacgacctcggcgttttttttgtcggtgacggcgtgtttcagattatccctggccagcagccgggaaaaatcctcgcccgtgattatatcgccaccttcaagctgttatcgctgtatgacatcgaacagtgttggttatgcgcggcgtctgcccgcgagcgcggcctggccgccgatacgccgtgggtggtggatgtagaaagcctcgagccagaagcgctgcgcgcccggcttgatgagttcaacgtgattctacgattctgaggcccagatgctccatactctaagcgtctctccctggcatgtcgatatcgacgcgatgctgcgtctggtgaagccaggcgacgatctgctcctgctctccgatggcgtggtcgcggcgattgacggcggccgtttccttgaaatcctgcaatccgcccccataaccctacatgctctgcaagacgatatcgaagcccgcgggctggctggtcaaattgcggacagtgtcgtcagggttggctatactgatttcgtcagtcttacggtcaaacatgaaggtcagttggcctggtaatggcgggatcgttgtatatttcttgacaccttttcggcaccgccctaaaattctgcgtcctcatattatatgaggcgatttattacgtgtttacgaagcaaaagctaaaaccaggagctatttaatggcaacagttaaccagctggtacgcaaaccacgcgcgcgcaaagttgcaaagagcaacgtgccggcgctggaagcctgcccgcagaaacgtggcgtatgtactcgcgtatataccaccactcctaagaaaccgaactccgcactgcgtaaagtttgccgtgtgcgtctgactaacggtttcgaagtcacctcctacatcggtggtgaaggtcacaacctgcaggagcactccgtgatcctgatccgtggcggtcgtgttaaagaccttccgggtgttcgttaccacaccgttcgtggtgcgcttgactgctccggcgttaaagaccgtaagcaggctcgctccaagtacggcgtgaagcgtcctaaggcttaatggttctccgttaagtaaggccaaacgttttatattaatgtcaaactaaactctttgagttttggacaatcctgaattaacaacggagtatttccatgccacgtcgtcgcgtcattggtcagcgtaaaattctgccggatccgaagttcggatcagaactgctggctaaatttgtaaatatcctgatggtagatggtaaaaaatctactgcagaaactatcgtatacagcgcgctggagaccctggctcagcgctctggtaaaactgaactggaagccttcgaagttgcgctcgaaaacgtgcgcccgactgtcgaagttaagtcccgccgcgtaggtggttctacttatcaggttccagttgaagtacgtccggttcgtcgtaatgccctggcaatgcgttggatcgttgaagctgctcgtaaacgcggtgataaatccatggctctgcgcctggcgaacgaactcactgacgctgcagacaacaaaggtactgcagttaagaaacgtgaagacgttcaccgtatggccgaagccaacaaggcgttcgcacactaccgttggtaatcccttcggagtcatagtcaccaggcgggcgtttcagatgagtcgcccgctctggataacttaactgaacgcctaaagaaataaacgaggaatcaaatggctcgtacaacacccatcgcacgctaccgtaacatcggtatcagtgcgcacatcgacgccggtaaaaccactactaccgaacgtattctgttctacaccggtgtaaaccacaaaatcggtgaagttcatgacggcgccgctaccatggactggatggagcaggagcaggaacgtggtatcaccatcacttccgctgcgactactgcattctggtctggtatggctaaacagtatgaaccgcaccgtgtaaacatcatcgacaccccggggcacgttgacttcactatcgaagtagaacgttccatgcgtgttcttgatggtgcggtaatggtttactgcgcagttggtggtgttcagccgcagtctgaaaccgtatggcgtcaggcaaacaaatataaagttccacgcattgcgttcgttaacaaaatggaccgcatgggtgcgaacttcctgaaagttgttggtcagatcaaaacccgtctgggcgcgaacccggttccgctgcagctggcaattggtgctgaagaaggtttcaccggtgttgttgacctggtgaaaatgaaagccatcaactggaacgaagctgatgcaggcgttaccttcgaatacgaagatatcccggctgacatgcaggaactggctgacgaatggcaccagaacctgatcgagtccgctgcggaagcttccgaagagctgatggaaaaatacctgggtggcgaagaactgactgaagaagagatcaaaaaagctctgcgtcagcgcgttctgaacaacgaaatcatcctggtaacctgtggttctgcgttcaagaacaaaggtgttcaggcgatgctggatgcggtaattgattacctgccatccccgatcgatgttccggcaatcaacggcatcctggacgacggtaaagataccccggctgagcgtcacgcaagcgacgaagagccgttctctgcactggcgttcaaaatcgctaccgacccgttcgttggtaacctgaccttcttccgtgtgtactccggtgtggttaactctggtgataccgtactgaactccgtgaaagctgcacgtgagcgtttcggtcgtatcgttcagatgcacgctaacaaacgtgaagagatcaaagaagttcgcgcgggcgatatcgctgccgctatcggtctgaaagacgtaaccactggtgacaccctgtgtgacccggatgcgccgatcattctggagcgtatggaattccctgagccggtaatctccatcgccgttgagccgaaaaccaaagctgaccaggaaaaaatgggtctggctctgggtcgtctggctaaagaagacccgtcattccgcgtatggactgacgaagagtctaaccagaccatcatcgccggtatgggtgaactgcacctcgacatcatcgttgaccgtatgaagcgtgaattcaacgttgaagcgaacgtcggtaaacctcaggttgcttaccgcgaagcgattcgccagaaagttaccgatgttgaaggtaaacacgccaagcagtctggtggtcgtggtcagtacggtcacgttgtgatcgacatgtacccgctggagccgggctctaacccgaaaggttacgagttcatcaacgacattaaaggtggtgtaatccctggcgaatacatcccggccgttgataaaggcatccaggaacagctgaaagctggtccgctggctggctacccggtagttgatatgggtatccgtctgcacttcggttcttaccacgacgttgactcctctgagctggcgtttaaactggccgcttctatcgcctttaaagaaggctttaagaaagcgaaaccagttctgcttgagccgatcatgaaggttgaagtagaaactccggaagagaacaccggtgacgtaatcggtgacttgagccgtcgtcgcggcatgctgcgcggtcaagaatctgaagtaactggcgttaagatccacgctgaagttccgctgtctgaaatgttcggatatgcaactcagctgcgttctctgaccaaaggtcgtgcatcatacaccatggaattcctgaagtatgatgatgcgccgaacaacgttgctcaggccgttattgaagcccgtggtaaataatccacaggattaaaacctaagtcccgtgctctctcctgaggggagagcactatagtaaggaatatagccgtgtctaaagaaaaatttgaacgtacaaaaccgcacgtcaacgttggtactatcggccacgttgaccatggtaaaactactctgaccgctgcaatcaccaccgtactggctaaaacctacggcggtgctgctcgcgcattcgaccagatcgataacgcgccggaagaaaaagctcgtggtatcaccatcaacacttcccacgttgaatatgacaccccgactcgccactacgcacacgtagactgcccgggccacgccgactatgttaaaaacatgatcaccggtgctgctcagatggatggcgcgatcctggttgttgctgcgactgacggcccgatgccgcagactcgtgagcacatcctgctgggtcgtcaggtaggcgttccgtacatcatcgtgttcctgaacaaatgcgacatggttgatgacgaagagctgctggaactggttgagatggaagttcgtgaactgctgtctcagtacgatttcccgggcgacgacactccgatcgttcgtggttctgctctgaaagcgctggaaggcgacgcagagtgggaagcgaaaatcatcgaactggctggcttcctggattcttacatcccagaaccagagcgtgcgattgacaagccgttcctgctgccgatcgaagacgtattctccatctccggtcgtggtaccgttgttaccggtcgtgtagagcgcggtatcatcaaagttggtgaagaagttgaaatcgttggtatcaaagaaaccgcgaaaaccacctgtactggcgttgaaatgttccgcaaactgctggacgaaggccgtgctggtgagaacgtaggtgttctgctgcgtggtatcaaacgtgaagaaatcgaacgtggtcaggtactggctaagccgggcagcatcaagccgcacaccaagttcgaatctgaagtgtacatcctgtccaaagacgaaggcggccgtcatactccgttcttcaaaggctaccgtccgcagttctacttccgtactactgacgtgactggtaccatcgaactgccggaaggcgtagagatggtaatgccgggcgacaacatcaaaatggttgttaccctgatccacccgatcgcgatggacgatggtctgcgtttcgcaatccgtgaaggcggccgtaccgttggcgcgggcgttgtagctaaagttctgggctaattcgttagctttgaattaaaaagggcgcttcggcgccctttttgctgtctatgatttggtgataagccgcgatggtataaatattcataaagtgcgccgccagggataattaataaacagtctattgtaatcataactattctcatttaaactttgtgcataaattgaacgggagtttatatgtacgtttgtttgtgcaatggcgtaagcgataaaaaaatccgtcaggttgtgcgtcaatttcaaccgcaatcttttcaacaattacgcaagtttattcccgttggaaatcaatgcggtaagtgcgtccgcgcggcacgtgaagtgatggaagatgaattaaccagcatgccggaattcaaagaaatcgcctgatcgcgactcttctctttttgacatccttatagcccggactacgcttcaataagtggaagcggagggactttataatgaaaggtgatgtcaaaatcataagttatctcaataaattattgggaaacgaactggttgctattaaccagtattttcttcatgcaagaatgttcaagaactggggcctgatgcgcctcaacgatattgaatatcatgaatctatcgatgagatgaaacacgccgataagtacatcgagcgtattttgtttcttgaagggctgcctaacctgcaggatcttggcaaacttggcatcggtgaggatgtcgaagagatgctgcagtctgacttacggctggagctcgaaggcgcgcaaaacctgcgtgaggcaatcgcctatgccgacagcgttcatgattatgtcagtcgcgatatgatgattgaaatccttgccgatgaggaaggccatattgactggctggaaaccgagttagatctgatcggcaaaatcggtctgcaaaattaccttcaatcgcagatcaaagtgtcagactagcgaacgtctgccacccgcaccaaaaacccgctgcagtcagaaatggcccaaacggcagcgggttgttcaaaccccatcgttgttgcttactcctcctgaacaacgccaatatcacccatgccatcccggcaagcagcgatgcggccaacaccagttgcggcaacctctgccagccgtgccaggcgccgagggcggcaagatatttaatgtcgccgtatcctaatccctcatagccgcgaaacaccctatatagccagtagagcagggcaaaaatgagatagcctgcaattgccccccagacggcatcctctagccgctgcggcgccagacacaggtaaaaaacaaaaccgctccacagcaggggacaggtgaggctgtcaggaagaagaccgcgaagcaggtcctgccggcataacgccagggttaatccacaataacaaactaagaaggggaggacggtaagcatggaacactcctgttcggggataatgcgctcactttgcttatcgtcgcgcgttagcgcaaagcgcatttgtgcaagatggatggctgcttcctgacttatttatcgtgttattgcattgccgagcgcctgggcgagaagacgcgcaaattatggtgattattttctaatcagcacttgcgtcgcgcctgaatttgcgtataatgcgcgggcctgtcaaaattgacggccggttcgatatgagccctggtagcgcagtttgctacctaacaatgttcccaatcggggaactctgtaagaacggttacactctcccatcaatcgtaatgggtatgaggagtaatcatttcgtctataaaataattggagctctggtctcatgcagaaccaaagaatccgtatccgccttaaagcgtttgatcatcgtctgatcgatcaatcaaccgcggaaatcgtcgagactgctaagcgcactggtgcgcaagtccgtggtccgatcccgctgccgacccgcaaagagcgtttcaccgttctgatctctccgcacgtcaacaaagatgcgcgtgatcagtacgagattcgtactcacaagcgtctggttgacatcgttgagccaactgaaaaaaccgttgatgctctgatgcgtctggacctggctgccggtgtagacgtgcagatcagcctgggttaatcaggtcatcgagcgattgagaggttgatacaatgattggtttagtcggtaaaaaagtgggtatgacccgcatcttcactgaagatggcgtctctatcccagtaaccgttatcgaagttgaagcaaaccgcgttactcaggtcaaagatctggctaacgatggctatcgcgctattcaggttaccactggtgctaaaaaagctaaccgtgtaactaagccggaagctggtcactttgctaaagctggcgtagaagctggccgcggcctgtgggagttccgtctggcagatggtgaagaatacaccgttggtcagaacattagcgttgaactgtttgctgacgttaaaaaagttgacgtaaccggtacctctaaaggtaaaggtttcgctggtaccgttaagcgctggaacttccgtacccaggacgctacccacggtaactccttgtctcaccgcgttccgggttctatcggtcagaaccagactccgggcaaagtgttcaaaggcaagaaaatggcaggtcagctgggcaacgaacgcgttactgttcagagcctggacgtagtacgtgttgacgctgagcgcaacctgctgctggttaaaggtggtgttccgggtgcaaccggctgcgacctgatcgttaaaccagctgtgaaggcgtaaggggatagcaatggaattagtattgaaagacgcgcagagcgcgctgactgtttccgaaactaccttcggtcgtgatttcaacgaagcgctggttcaccaggttgttgttgcttatgcagctggtgcgcgtcagggtactcgtgctcagaagactcgtgctgaagtaactggttcaggcaaaaagccatggcgccagaaaggtaccggccgtgcgcgttcaggttctatcaagagcccgatctggcgttccggtggcgtaaccttcgctgctcgtccgcaggaccacagtcaaaaagttaacaagaagatgtaccgcggcgcgctgaaaagcattctgtccgaactggtacgtcaggatcgtctgatcgttgtcgagaagttctctgtagaagcgcctaaaactaagctgctggctcagaaactgaaagacatggctctggaagatgtgctgatcatcaccggtgagctggacgagaacctgttcctggccgcacgtaacctgcacaaggttgacgtacgcgatgcgactggtatcgacccggttagcctgatcgccttcgacaaagtcgtaatgactgctgatgctgttaagcaagttgaggagatgctggcatgattcgtgaagaacgtctgctgaaggtgctgcgcgcaccgcacgtttctgaaaaagcgtctactgcgatggaaaaaaccaacaccatcgttctcaaagttgctaaagacgcgaccaaagcagaaatcaaagctgctgtgcagaaactgtttgaagtcgaagtcgaagtcgttaacaccctggtagttaaagggaaagttaaacgtcacggacagcgtatcggtcgtcgtagcgactggaaaaaagcttacgtcaccctgaaggaaggccagaatctggacttcgtcggcggcgctgagtaagtcggaggagtaatacaatggcagttgttaaatgtaaaccgacatctccgggtcgtcgccacgttgttaaagtggtcaacccagagctgcacaagggcaaaccttttgctccgctggttgaaaaaaacagcaaatccggcggtcgtaacaacaatggccgtatcaccactcgtcatatcggtggtggtcacaagcaggcttaccgtattgttgacttcaaacgcaacaaagatggtatcccggcagttgttgaacgtcttgagtacgatccgaaccgttccgcgaacatcgcgctggttctgtacaaagacggtgagcgccgttacattctggccccgaaaggcctgaaagctggcgaccagattcagtctggcgttgatgctgcaatcaaagcaggcaacaccctgccgatgcgcaatatcccggttggttctaccgttcataacgtagaaatgaaaccaggtaaaggcggtcagctggctcgttccgctggtacttacgttcagatcgttgctcgtgacggtgcttatgtcaccctgcgtctgcgttctggtgaaatgcgtaaagtcgaagcagactgccgcgctactctgggcgaagttggcaatgctgagcatatgctgcgcgttctgggtaaagcaggtgctgcacgctggcgtggtgttcgtcctaccgttcgcggtactgcgatgaacccagtcgatcacccacatggtggtggtgaaggtcgtaactttggtaagcacccggtatccccgtggggcctgcagaccaaaggtaagaagacccgcagcaacaagcgtactgataaattcatcgtacgtcgccgtagcaaataattttagaggataagccatgccacgttctctcaagaaaggtccttttattgacctgcacttgctgaagaaggtagagaaagcggtggaaagcggagacaagaagcccctgcgcacttggtcccgtcgttcaacgatctttcctaacatgatcggtttgaccatcgctgtccataatggtcgtcagcacgttccagtctttgtttccgacgaaatggttggtcacaaactgggtgaattcgcaccgactcgtacttatcgcggccacgctgctgataaaaaagcgaagaagaaataaggtaggaggaagagatggaaactttagctcaacatcgccatgctcgttcttctgctcagaaggttcgccttgtagctgacctgattcgcggtaagaaagtgtcgcaggccctggatattctgacctacaccaacaaaaaagctgctgtactggtcaagaaggtactggaatctgccattgctaacgctgaacacaacgatggcgctgacattgatgatctgaaagttgcgaaaattttcgtagacgaaggcccgagcatgaagcgcattatgccgcgtgctaaaggtcgtgcagatcgcatcctgaagcgcaccagccacatcactgtggttgtgtccgatcgctgagactctggagactagcaatgggtcagaaagtacatcctaatggtattcgcctgggtattgtcaaaccatggaactctacctggttcgcgaacaccaaagaattcgctgacaacctggacagcgattttaaagtacgtcagttcttaactaaagagctggctaaagcgtctgtatctcgcatcgttatcgagcgtccggctaagagcatccgtgtgaccattcacactgctcgcccgggtatcgttatcggtaagaaaggcgaagacgtagaaaaactgcgcaaggtcgtagcggatatcgctggcgttcctgcacagatcaatattgccgaagttcgtaagcctgaactggacgctaaattggttgctgacagcatcacttctcagctggaacgtcgcgttatgttccgtcgtgctatgaagcgtgctgtacagaacgcaatgcgtctgggcgctaaaggtatcaaagttgaagttagcggccgtctgggcggcgcggaaatcgcacgtaccgaatggtaccgtgaaggtcgcgtaccgctgcacactctgcgtgctgacatcgactacaacacctctgaagcgcacaccacttacggtgtaatcggcgttaaggtatggatcttcaaaggtgagatcctgggtggtatggctgctgttgaacaaccggaaccggctgctcaacctaaaaagcagcagcgtaaaggccgtaaataaggagcgtcgctgatgttacaaccaaagcgtacaaaattccgtaaagtgcacaaaggccgcaaccgtggtctggcgcagggtacggatgttagcttcggcactttcggtctgaaagctgttggccgtggtcgtctgactgcacgtcagatcgaagcagcacgtcgtgctatgacccgtgcagttaagcgtcaaggtaagatctggatccgtgtattcccggacaaaccgatcaccgagaagccgctggaagttcgtatgggtaaaggtaaaggtaacgtggagtactgggttgccttgattcagccgggtaaagtcctttatgaaatggacggcgtgccggaagagctggcccgtgaagcattcggcctggcagcagcgaaactgccgatcaaaaccacctttgtaactaagacggtgatgtaatgaaagcaaaagagctgcgtgaaaaaagcgttgaagagctgaacgctgagctgctgaacctgctgcgtgagcagttcaacctgcgtatgcaggctgcaagtggccagctgcaacagactcatctgctgaagcaagtgcgtcgtgatgttgcacgcgttaagactttactgactcagaaggcgggtgcgtaatgaccgataaaatccgtactctgcaaggtcgcgtagttagcgacaaaatggagaaatccattgttgttgctatcgaacgttttgtgaaacacccgatctacggtaaattcatcaaacgtacgaccaaactgcacgtacatgacgagaacaacgaatgtggtatcggcgacaaggttgaaatccgtgaatgccgtccactgtccaagactaagtcctggacgctggttcgcgttgtagagaaagcggttctgtaatagagtacgcattctcaatacgaataaacggctcagcgatgggccgtttattttttctacccatattgcagaagcggtgttataatgccgcgccctcgatatggggctttttaacgacccagcttttgggtcccagtagtagttgacattagcggagcactaaaatgatccaagaacagactatgctgaacgtcgccgacaactccggtgcacgtcgcgtaatgtgtatcaaggttctgggtggctcgcaccgtcgctacgcaggcgtaggcgacatcatcaagatcaccatcaaagaagcaattccgcgtggtaaggtcaagaaaggtgatgtgctgaaggcggtagtggtgcgcaccaagaagggtgttcgtcgcccggacggttctgtcattcgcttcgatggtaatgcatgcgttattttaaacaataacagcgagcaacctatcggtacgcgtatttttgggccggtaactcgtgaacttcgtaacgagaagttcatgaaaattatctctctggcaccagaagtactctaaggagcgaatcatggcagcgaaaatccgtcgtgatgacgaagttatcgtgttaaccggtaaagataaaggtaaacgcggtaaagtgaaaaatgtcctgtcttccggcaaggtcattgttgaaggtatcaacctggttaagaaacatcagaagccggttccggccctgaaccaaccaggcggcatcgtagagaaagaagcagctattcaagtctctaaccttgctatcttcaacgcggcaaccggcaaggctgaccgtgtaggctttagattcgaagacggcaaaaaagtccgtttcttcaaatctaatagcgaaactatcaagtaatttggagtagtacgatggcgaaactgcatgattactacaaagacgaagtagtcgctaaactcatgactgagtttaactacaattctgtcatgcaagtccctcgggtcgagaagatcaccctgaacatgggtgttggtgaagcgatcgctgacaagaaactgctggataacgcagcagctgacctgacagcaatctccggtcaaaaaccgctgatcaccaaagcacgcaaatcagttgcaggcttcaaaatccgtcagggctatccgatcggctgtaaagtaactctgcgcggcgagcgcatgtgggagttctttgagcgcctgatcactattgctgtaccgcgtatccgtgacttccgtggcttgtccgctaagtctttcgacggtcgtggtaactacagcatgggtgtccgtgagcagatcatcttcccagaaatcgactacgataaagtcgaccgcgttcgtggtttggatattaccattaccactactgcgaaatctgatgaagaaggccgcgctctgctggctgcctttgacttcccgttccgcaagtaaggtagggttacttaatggctaagcaatcaatgaaagcacgcgaagtaaagcgcgtggctttagctgataaattcttcgctaaacgcgctgaactgaaagctatcatctctgatgtgaacgcaaccgacgaagatcgttggaacgctgttctcaagctgcagactctgccgcgtgattccagcccgtctcgtcagcgtaatcgctgccgtcaaacaggtcgtccgcatggtttcctgcggaagttcgggttgagccgtatcaaggtccgtgaagccgctatgcgcggtgaaatcccgggtctgaaaaaggctagctggtaattgtcaccaattgaatcacgggagtaaagacagatgagcatgcaagatccgatcgcggatatgctgacccgtatccgtaacggtcaggccgcgaataaagctgcggtcaccatgccttcctccaagctgaaagtggcaattgccaacgtgctgaaggaagaaggctttattgaagattttaaagttgaaggcgacatcaagccggaactggaactgactcttaagtatttccagggtaaagctgttgtagaaagcattcagcgtgtcagccgcccaggtctgcgcatctacaaacgtaaagatgagctgccgaaagttatggcgggtctgggtatcgcagttgtttctacctctaaaggtgttatgactgatcgtgcagcgcgccaagctggtcttggtggcgaaattatctgctacgtagcctaatcggaggaaaaaatgtctcgtgttgctaaagcaccggtcgttgttcctgccggcgttgacgttaaagtcaacggtcaggttattacgatcaaaggtaaaaatggcgagctgactcgtactctcaacgatgctgttgaagttaaacatgcagataatgcactgaccttcggtccgcgtgatggttacgtagacggatgggctcaggctggtaccgcgcgtgccctgctgaactcaatggttatcggtgttaccgaaggcttcactaaaaagcttcagctggttggtgtaggctatcgtgcagcggtcaaaggggatgtagtaaacctggctttaggtttctctcatcctgttgagcataaactgccggccggtatcactgcagaatgcccgactcaaactgaaatcgtgctgaaaggcgctgataagcaggtgatcggtcaggttgcagcagatctgcgcgcctaccgtcgtcctgagccttacaaaggcaagggtgttcgttacgccgacgaagtcgtgcgtaccaaagaggctaagaagaagtaaggtaacactatggataagaaatctgctcgtatccgtcgtgcgacccgcgcacgccgcaagctccaggagctgggtgcaactcgcctggtggtacatcgtaccccgcgtcatatttacgcacaggtaattgctccgaatggttctgaagttctggtagctgcttctactgtagaaaaagctatctctgaacaactgaagtacaccggtaacaaagacgcggctgcagctgtgggtaaagctgttgctgaacgcgctctggaaaaaggcatcaaagatgtttcctttgaccgttccgggttccaatatcatggtcgtgtccaggcactggcagatgctgcccgtgaagctggccttcagttctaaggtagaggtgtaagatggctcacatcgaaaaacaagctggcgaactgcaggaaaagctgatcgcggtaaaccgcgtatctaaaaccgttaaaggtggtcgtattttctccttcacagctctgactgtagttggtgacggtaacggtcgcgtaggttttggttacggtaaagcgcgtgaagttccagcagcgatccagaaagcgatggaaaaagcccgtcgcaatatgattaacgtcgcgctgaatactggcaccctgcagcacccggttaagggtactcacacgggttctcgtgtattcatgcagccggcttccgaaggtaccggtatcatcgccggtggtgcaatgcgcgccgttctggaagtcgctggggttcgtaacgttctggctaaagcatatggttccaccaacccgatcaacgtggttcgtgcaccattgaggcctggaaaatatgaagtctccagatatggtcgctgccaagcgtggtaaatccgttgaagaaattctggggaaataaaccatggcaaagactattaaaattactcaaacccgcagtgcaatcggtcgtttgccgaaacacaaggcaacgctgcttggcctgggtctgcgtcgtattggtcacaccgtagagcgcgaggatactcctgctgttcgtggtatggtcaacgcggtttccttcatggttaaagttgaggagtaagagatgcgtttaaatactctgtctccggccgaaggctccaaaaaggcgggtaaacgcctgggtcgtggtatcggttctggcctcggtaaaaccggtggtcgtggtcacaaaggtcagaactctcgttctggcggtggcgtacgtcgcggtttcgagggtggtcagatgccactgtaccgtcgtctgccgaaattcggcttcacttctcgtaaagcaatgatcactgcagaagttcgtctgtctgatctggctcacgtagaaggcgatgtggtagacctgaacacgctgaaagcggctaacattatcggtatccagatcgagttcgcgaaagtgatcctgtctggtgaggtaactcgtccggtaactgttcgtggcctgcgcgtgactaaaggcgctcgtgctgctatcgaagctgctggcggtaaaattgaggaataagtagcagatggctaaacaaccgggattagattttcaaagtgccaaaggtggaattggcgaactgaaacgcagacttttgtttgttatcggtgcgctgattgtgttccgtattggctcttttattccgatccctggtattgatgccactgtacttgccaaactgcttgagcaacagcgaggcaccatcattgaaatgtttaacatgttctctggtggtgctctcagccgtgcttctatctttgctctggggatcatgccgtatatttcggcgtcgatcattgtccagctgcgaccgttgttttcaaccgctggcagaactgaagaaagaaggggagtctggtcgtcgtaagatcagccagtacacccgctacggtactctggtgctggctatattccagtcgatcggtattgctaccggtctgccgaatatgcctggtatgcagggcctggtgattaatccgggctttgcattctatttcaccgctgttgttagtctggtcacagggactatgttcctgatgtggctcggcgaacagatcaccgaacgcggtatcggaaacggtatctcgatcctgatcttcgccgggatcgttgcgggactcccgccggccatcgcccatactatcgagcaagcgcgtcaaggcgacctgcacttcctcctgttgctgttggttgcagtattagtatttgcagtgaccttcttcgttgtattcgttgaacgtggtcaacgccgcattgtggtaaactacgctaagcgtcaacagggtcgtcgtgtctatgctgcacagagcacacatttaccgctgaaagtgaatatggcgggggtaatcccggcaatcttcgcttccagtattattctgttcccggcaaccatcacgtcatggttcgggggcggtactggttggaactggctgacaacaatttcgctgtatttgcagcctgggcaaccgctttatgtgttactctatgcgtctgcaatcatcttcttctgtttcttctacacggcgttggttttcaacccgcgtgaaacagcagataacctgaagaagtccggtgcatttgtaccaggaattcgtccgggagaacaaacggcgaagtatatcgataaagtaatgacccgcctgactctggtcggtgcgttgtatatcacttttatctgcctgatcccggagttcatgcgtgatgcaatgaaagtgccgttctacttcggtggaacctcgctgcttattgttgtcgtcgtgattatggactttatggctcaagtgcaaactctgatgatgtctagtcagtatgagtctgcattgaagaaggcgaacctgaaaggctacggccgctaactggtcgcccgagaagttacggagagtaaaaatgaaagttcgtgcttccgtcaagaaattatgccgtaactgcaaaatcgttaagcgtgatggtgtcatccgtgtgatttgcagtgccgagccaaagcataaacagcgccaaggctgatttattcgcatatttttcttgcaaagttgggttgagctggctagattagcaagccaatcttttgtatgtctgtacgtttccatttgagtatcctgaaaacgggcttttcagcatggtacgtacatattaaatagtaggagtgcatagtggcccgtatagcaggcattaacattcctgatcagaaacataccgtaattgctttaactgcaatttttggtatcggcaagacccgctctaaagccatctgcgctgaaacgggtatcgctgaaaatgttaagatcagtgagctgtctgaagaacagattgattctctgcgtgaagcagtaggtaaatttgtcgttgaaggtgatctgcgccgtgaaatcaccctgagcatcaagcgtctgatggaccttggttgctaccgtggtttacgccatcgtcgtggtcttccggttcgcggtcagcgtactaagaccaacgcacgtacccgtaagggtccgcgtaaaccgatcaagaaataatcggggtgattgaataatggcaaaggcaccagttcgtgcacgtaagcgtgtaagaaaacaagtctctgatggcgtggctcatatccatgcttcttttaacaacaccatcgttaccatcactgatcgtcagggtaacgcgctgggttgggcaacagccggtggttccggtttccgtggttctcgcaaatccactccgtttgcagctcaggttgcagcagagcgttgcgcagaagccgtaaaagaatacggcatcaagaatctggaagttatggttaaaggtccgggtccaggtcgcgaatctactattcgtgcactgaacgccgctggtttccgcatcactaatattactgatgtgactccgatccctcataacggttgtcgtccgccgaaaaaacgtcgcgtataacgcctcgtttctaggattgttggagaaagaaaatggcaagatatttgggtcctaagctcaagctgaaccgtcgtgagggcactgacttattccttaagtctggcgttcgcgcgatcgataccaagtgtaaaattgaacaagctcctggccagcacggtgcgcgtaagccgcgtctgtctgactatggtgtgcagttgcgtgaaaagcaaaaagttcgccgtatgtacggtgtgctggagcgtcagttccgtaactactataaagaagcagcacgtctgaaaggcaacaccggtgaaaacctgttggctctgctggaaggtcgtctggacaacgttgtataccgtatgggcttcggcgccactcgtgctgaagcacgccagctggttagccacaaggctatcatggtaaacggtcgtgttgttaacatcgcttcttatcaggtaaaagcgaatgacgttgttagcatccgtgagaaagcgaaaaagcaatctcgcgtgaaagccgctctggagctggctgagcagcgtgaaaagccaacctggctggaagttgatgctggcaagatggaaggtacgttcaagcgtcagccggagcgttctgatctgtctgcggacattaacgaacacctgatcgtcgagctttactccaagtaaagcttagtaccaaagagaggacacaatgcagggttctgtgacagagtttctaaaaccgcgcctggtcgatatcgagcaagtgagttcgacgcacgccaaggtgacccttgagcctttagagcgtggcttcggccatactctgggtaacgcactgcgccgtattctgctctcatcgatgccgggttgcgcggtgaccgaggttgagattgatggtgtactgcacgagtacagcaccaaagaaggcgttcaggaagacatccttgaaatcctgctcaacctgaaagggctggcggtgagagttcagggtaaagatgaagtcatccttactttgaataaatctggcattggccctgtgactgcagccgacattacccacgacggtgatgtcgaaatcgtcaagccgcagcacgtgatctgccacctgaccgatgagaacgcatctattagcatgcgcatcaaagttcagcgcggtcgcggttatgtgccggcttctgcccgaattcattcggaagaagatgagcgcccaatcggccgtctgctggtcgacgcctgctacagccctgtagagcgtattgcctacaatgttgaagccgcgcgtgttgagcagcgtaccgacctggacaagctggtcatcgaaatggaaaccaacggcacaatcgatcctgaagaggcgattcgtcgtgcggcaaccattctggctgaacaactggaagctttcgttgacttacgtgatgtacgtcagccggaagtgaaagaagagaaaccagagttcgatccgatcctgctgcgccctgttgacgatctggaattgactgtccgctctgctaactgcctcaaggcagaagctatccactatatcggtgatctggtacagcgtaccgaggttgagttgctgaaaacgccgaacctgggtaaaaaatctcttaccgagattaaagacgtgctggcttcacgtggtctgtctctgggcatgcgcctggaaaactggccgccggcaagcattgctgacgagtaaccggatcacaggttaaggttttactgagaaggataaggtcatgcgccatcgtaagagtggtcgtcaactgaaccgcaacagcagccatcgccaggctatgttccgtaacatggcaggttcgctggttcgtcatgagatcatcaagacgaccctgccgaaagcgaaagaactgcgtcgcgtagttgagccgctgattactcttgccaagactgatagcgttgctaatcgtcgtctggcattcgcccgcactcgtgataacgagattgtggcaaaactgtttaacgagctgggcccgcgtttcgcgagccgcgccggtggttacactcgcattctgaagtgtggcttccgtgcaggcgacaacgcgccgatggcatacatcgagctggttgatcgtgctgagctgaaagcagaagctgctgcagagtaatctgtagtaacgtaaaaaaacccgccccggcgggtttttttatatctaccgcaatcccacttcactacactatctgtactctttttgttcatccctgggagccgtataatgtggttactggaccagtgggcagaacgccacatcctcgacgcacagtctaaaggcgagtttgataatctgacgggcagcggcgaaccgctggcgctggatgatgattcacacgtgccccctgaactgcgcgccggttatcgcttattaaaaaatgccggctgtttgccaccggagcttgagttacgtagagatgccatggcgttgagcgacttactcaagaccgtagagcatgatgacccacggtatgccgagttaaaccgtcgcttgactctgtttgaactgaaattacgtcaggcgggtatgaataccgattttctacgcggtgattatgccgacagactgtggcacaaaattaacgaggagtagctatgtatcggattggcgaactggccaaattggctgatgtcaccccggataccatccgctattacgaaaagcagcaaatgatggatcatgatattcgtactgaaggcggttttcgcctctattcggataacgatctgcagcggctgcgctttatccgttatgccaggcaattaggcttcactctggagtcgatccgcgaattattatcgatccgcatcgatccagaacatcatacttgtcaggagtctaaagggatcgtccaggcccgtctgagtgaagtcgaagcgcgtatcaaagaattggaaacgatgcggcgttctttacagcggctgaatgatgcctgctgcggcacggcgcacagtagcgtttactgctcgattctcgaagctttagagcaaggtgccagcggtagccatgccgggcgttgattttttccgcgcgtggatctacactcgcgccgaattgatacatgaactggagttactatgagtcgctatcagcataccaaagggcaaattaaagataatgcgattgaggcattactgcatgacccattattcagacagcggattgagaaaaataagaaagggaaaggaagctatcaacgtaaagacaaacatgcagggcggaatgaccgggaggccagtggcaagcaagcgaatcgcttttttaccactggccttctgctttctgtgtgctgattaagaacggttgttttgttcttttaacagatcgcgaatttcactcagtagcacttcttctttgctcggtgccggagcggcaggcgcttcttctttcttacggttcagtttattcatcagtttgatcgccatgaaaatcgcgaaggcaacgatgatgaaatcgaagacgttctgaataaacacaccataatgcatgacaacggctgggacatccccctgcgcatcgcgtagcgtaacggcgaactgtttaaagtcgatcccgccaatgagcaaacccagcggaggcataataatatcggccactaaagacgatacaattttaccaaatgctgcaccaatgatgacacccactgccaaatcgacaacattcccgcgcatcgcgaattcgcggaattcttttaacatacccattttactctccttgagccagctgacattgataagtttatcaaatgtatttccattttccattgctgttgaataattgctggaaaatattatccattgataaataagggataataaaaaggcgtctgcgcgacgcccattgtaattacaggaagaacggactcggttggaatagtctctcaacatcggagataaatttcttgtcggtcaggaacataattacgtggtcgccttgctcaatacgtaaattattattggcgatcattacgtcattgccgcgcaccaccgcgccaataattgtgcctggcggcagcttaatttcatcaattgaacggccgactacccgcgaggtgctttcatcgccatgcgcgacggcctcaatggcttcggcaacgccgcggcgtagcgacgaaacaccgacaatatcagctttacgtacgtggctcagcaaggcagaaatcgtggcttgttgcggtgatatcgcaatatcgatcacgcttccctgaaccagatcaacatatgcgcgacgctggatcagcaccatgaccttcttcgcgcccatccgcttggctagcattgccgacatgatattggcttcgtcatcgttggtgacggcaataaagagatcgacttgatcgatatgctcttccgccagtaactcttgatccgatgcatcgccataaaagacgatcgtattctgcagcttttcggcaagttcagcggcacgctgttgatcgcgctcgatcaacttcacgctgtagtctttctccagcctgtgagcgaggcccgcgccgatgttgccgccgccgaccagcataatgcgtttgtagggtttctccagacgttggagttcgctcattaccgcgcgaatatgttgcgacgcggcgataaagaagacttcgtcgcccgcttctacgatggttgatccctgcgggcgaatcggtcgatcgtggcggaaaattgccgcaacgcgcgtgtcgatgtgcggcatatgttcgcgcatcgtggaaagcgcattaccgaccagcgggccgccataataagccttcacaacggccaggcttactttcccttctgcgaagttcaccacctgcagcgcgcctggatattcgatcaggcggtagatattatcgatgactaactgctccggagcgatcagatggtcaattggcaccgcttctgaatgaaaaagtttatcggcatcgcgaacgtaatcgggcgaacgaatacgggcgatgcgattcggcgtattaaacagcgaataggcgacctggcaggctaccatgttggtctcatccgaactggttacggcgaccagcatatcggcatcatcggcgccagcttcgcgcagcacgcgcggatgcgaaccgtggccctgaacgacgcggagatcgaacttatcctgcaggccgcgcagacggtcgccgttggtatcgaccagggtaatatcgttgttttcgccaacgagattttccgccagcgtgccgcctacctgtccggcgccaagaataataatcttcatcagcagtgacccattaattgcgctttttgattagcttagcgtaaaagaagccatcgccttcttccgctcctggcagattttgctgacccggggtttccggcgttcccgtctcatggagttcggcatctcgggtacgggtcaggaaagcggcgatctgttggctattctcttccggcaaaatagagcatgtcgcatagaccagcgtaccgccaggcttaagatgagcccaggtggcatcgagaatttctgcctgtaattgcgctagctctgcgatatcgcgatcccggcgcagccatttaatatccggatggcgacggataacgccggtggccgaacatggcgcatcaagcaaaatacggtcgaactgctcatcgccgcaccactgttcaggatagcggccatcgccctgtttcacttccgctttcatgcccagacgtttcaggttgtcatagacacgggacaggcgctgctggtcgatgtcgaccgccatcagactcgcctgcggcgcgacttccagaatatgcgtcgtcttgccgcccggcgccgcgcagagatcgagaatgcgctcgccgtttgccggttgcaagtagcgcatgcagccctgggctgaggcgtcctgaacggttacccagcctttatcaaatcctggtaacgcatggaccggggctggggtcgcaagacggacggcatccggatagtccgggtgagtgaaaccctgtaaaccagcgtcttccagcagtgcgagccattcatctcgcgaatgatgattgcgattcacacgcagccacattggcggacgtagattattggctgacacaatatcctgccattgttgcggccaggcctgctgcagacgtttaagcagccatttaggatggagataacggttctcgtgctgggcgaattcggccagcagctcttcctgctggcgctgaaactggcgtaatacgccattgataagccctttaagctgcggacgtttaattgccaccgcgccttccaccgtttccgccagcgcggcgtgtgggggaattcgcgtataaagtagctgatacaggccgaccatgatcaggaaatgaacggtacgctgtttgccggtcattgggcgggccatcagcttaccgatcagccactcgagttggctgagggtacgcaagacgccgaagcacagctcctgcagcagcgctttgtctttctcgctcactttttgctgcagcggcggcagaacattgcttaaagactggcctttctcaacgacctgctcaatggcctgggctgccaggctgcgtaaattactattctttttcataagcgcaaaaataaaaatgcccggcgaacccgggctttagaagagaagtgcgtcaggcaagacggtttccggggataaaccattcccggcgagagttcagtaaatcctgggcactcatcgcttttttccctgccggctgcagcgattccagattcagaatcccgttgccggtggcgacctggatcccttgcttggttgctgcgacgatcgtacctggctcagcgttggcggactccgtaataacggatgcgcgccataccttcaccggttgttcatcgatttccagccagctcatcggccagggattaaatgcgcggatgcagcgttcgagctgttctgcggaaagcgaccaatcaatacgggcctcttccttactcagcttctcggcgtagctgacccgcgattcgtcctgaacttcaggctctgcgctaccatccgccagctgcgctaaggtcgccagtagaccctctggtccaaggttggccagtttatcgtacaggctgccgctggtatcttccgcggtaatcgggcaggagagtttatacagcatgtcaccggtatcaagaccgacgtccatctgcatgatggttacaccggtttcggcatcgccagcccatagcgaacgctgaatcggcgctgcgccacgccagcgaggaagcagggagccgtgaacgttaatgcagcccaaacgcggcatttcaagaaccgctttcggcaggatcagtccataagccacgacgaccataacatcggcgttaaggtcggcaactaattgctgattttcctgcggacgtagggaagatggctggaagaccggtatattattggcttcagccagcacttttaccgggctcggcatcaattttttgccgcgaccagcagggcggtcgggctgagtaaatacgccgacaacctgatgttcagacgacaacagcgcgtcaaggtgacgcgctgcaaagtcgggggttccggcgaaaatgatacgtagtgtttgtgacacgttcatccttgttatcaggcacgggcgcgtaaacgatccagtttttcaactttctggcggatgcgctgctgtttgagcggcgacagatagtcaatgaacagcttaccgaccaggtgatccatttcatgctggatacaaatagccaacaagccatcagcttccagttcgaaagtcttaccttcacggtccagcgcgcggatttttacggtttcggctcgtggaaccagcgcacgttgttccggaattgacaaacaaccttcttcaatgccggtttcgccgtctttttcgagtagctctgggttgatgagcaccagacgctcttcacggttttccgagacatcgataacgataatgcgctgatggatatccacctgcgtggcggccagaccaataccttcttcagcgtacatcgtgtcgaacatatcatcgacgatacgctgaatttctgcattcacttctttgaccggctcggcgactttgcgaaggcgctcgtccggaatatgtaacacttgcaaaactgccataaagatccagagtcgtattcagtagttgataagattattacctctattctagacaaaaccccctctaattgacagtctcgctaaccaatcacaaggattggctgagccgctaatggcaggggggaacggatgacgcccacggagatttggttgcgcctgatgcgggtgaataacctgtacggcgatgaaatggtattgattgcacgacggctaggatgtacaggccagctgaatactgaaacgttgcgggctgcgggtttaactaaagcgcaggcaacacagtttcttgccctcaaccaacagcaaattgatgtttcactgcaatggttagagcaaccagaacatcatctgatcacggcggatcacgcgctctatccgccgcagctacgcgctatcgatgattatcccggcgcgctgctggtctgcggtaacgtcgatctcctgtgtagccggcagctggctatcattgggagccgtgcacactcgtggtacggcgcgcggtggggaaaagcattcagtgaagcgcttgctcagtatggcttgacccttaccagtggtctggcgttggggattgatggcatcgcccaccgcggggcattggcggcaaagggaaaaaccatcgccgtattaggcaacggtctctctgatatctacccgcaccggcatcgggctttagcaaagcagatcgtggaaagcggcggcgcgctactttccgaatttcctctctctgcgctaccgttaccagggaatttcccgcgccgcaaccggattatcagcgggttaagcgctggggttctggtgatagaggccgccttgaaaagcggttctctggtaactgtccgttgcgcgctggagcaggggagagatgtttttgccatgcctgggccaattggcaatcctggctctgaagggccgcactggctaataaagcagggagcagttcccgttaccgtgccggaagagatccttgagtattggcaatatgagctttcagcgcgggaagagaccgctgatttgctaaataattacgcagatcagcctcctgtagcattgccatttccagagctcctggctaacgtaggagatgaggtaacacctgttgacgttgtcgctgaacgtgccggccaatctgtgccagtaaccgtagcccagctacttgaactggagttagcaggctggatcgcagctgtacccggcggctatgtccgattaaggagggcaagccatgttcgacgtactcatgtatttgtttgagacttatatccataacgaagcagaaatgcgcgtggatcaggacaaactgacgcgggatctgaccgatgcaggttttgagcgggaagatatctataacgcgttaatgtggctcgagaaactggctgattatcaggaaggtctcgttgaacccatgcagctcgcctccgacccgctctctcttcgggtatacaccgatgaagagtgccagcgtctggatgccagctgtcgaggatttttactcttcctcgagcagatccaggtgttgaacctcgaaacgcgagaaatggtgatagagcgcgtactggcgctggatacggcagagtttgaactggaagacctgaaatgggtgatcctgatggttctgtttaatattccaggctgtgaaaacgcctatcagcaaatggaagaattactcttcgaagtaaatgaaggtatgctgcattaatcttattgcagcaacatcgagttgttatgaccaaatcagcactgttttcggtgcgtaaaaacgagccctgcccgcagtgcggggccgaactggtgattcgttccgggaaacatggcccgtttctcggctgttctcactatccggactgtgactatgtccgtcccctgaaaagtcaggcggacggccatatcgtcaaggtgctggaggggcaagagtgcccatcttgcggcgctgtcatggtgttacgccaggggcgttttggtatgttcatcggctgcagtcgctatcccgaatgcgaacataccgagctgattgataaacctgatgagaccgctatcgcgtgtccgcaatgcggacagggtcatctggtgcagcgtcgctcccgtttcggtaaaacctttcattcctgcgatcgctaccctgattgccagttcgtaattaattttaaaccggtggcgggcgaatgccctgaatgccattacccgctattaatagaaaagaaaacggcacagggtgttaaacgcttttgcgccagtaaacaatgtggaaagccgatcccggcggaacaaataagtgaataaaaacctgccctcagagaccgtcgcccaggctgtcgcggtactgaataatgaacatgtcatcgcctatccaaccgaagctgtgtttggcgtcggttgcgatccggatagcgaaacggccgtgatgcgcctactggcgttaaagcaacgccctgtggaaaaggggctgatacttatcgccgccagttttgaccaactgaaaccgtatattgatgattcccgattaagcgacgcgcagagagcggttatctttgccagttggcctgggccggtgacgtttgtgttcccggcgcgtccggatacgccacgctggctgacggggcgctttgattcgcttgccgtgcgcgttaccgatcacccactggtaattgaattatgtgaagcctacggaaagccgctggtctcgacgagcgccaacttaaccggtcagccgccgtgccggactactgctgaagtacgcgcccagtttggcgatagtttcccggtggtggatggcgcaacgggcgggcggcaaaacccatctgaaattcgtgatgccctgacgggtgaacagttccgccaggggtaatttatggaaacttatgccgtttttggtaaccctatagcgcatagcaagtcgccttccattcatcagttgtttgccgaacagttacatattgcgcacccctacggtcgggtactggcgccattagatgattttgtgaataccctggacgcttttttcaacacgggcggtaagggcgctaacgtgaccgttccctttaaagaggaagcttttgcccgtgccgatgaactcactgaacgcgccgcgctggctggtgcagtcaatacgttgaagcgcctggaagatggccgtctgcttggcgacaatacggatggcattgggttattaagcgacttagagcgtctgggctttatcaagcctggtatgaggattttattgattggcgcaggcggcgcatctcgcggcgtattgttaccgctgctctctttagattgcgcggtcaccatcgttaaccgtactttttcccgcgctcatgagctggcaacgctatttgctcataccggcagcgttagcgcgttatcgctggataaactgggaggccatcagttcgatctcattattaacgcgacgtccagcggaataagcggcgatatcccggcaataccttcctcgttaattcatgccgatgtttactgctatgacatgttttatcagaaaggaaatacgccatttctgcattggtgccaacagtatggcgctaaaaaaatggcagatggattaggtatgctggtggctcaggccgcacatgccgttctgctctggcacggtagactaccggaaattgccccggtgattgctgttttacatcaggaactgaatgcgtgaaccaggcgatccaatttcccgatagagaagagtgggacgctgaacggcagtgcatcgttttccccgcgttggtcaatggcatgcagttaacttgcgcgattcggggtcagacactgcagcaacggttcggtggcgatgagccagcgcgatggctggctctctttagtgaacatcgctgggatttggaagatgaagcggaagcgttgattcgcgatcggcaagaagatcatcagggttggctctggctttcctgatccaggtagtcgtctttccacttcacgtagttgttggctgaatacttcaggccagcatattccgcctccgtcagggggcggatttgttttaccgggttgccaaaatagagataaccgctttccagacgcttgttttgcggcaccaggctgccggcgccgatcatcacgtcatcttctaccaccacgccatccagcagaattgaccccattccgacaagaatgcgattgccgatagtgcagccgtgcagcatgaccttatgcccgacggtgacatcttctcctatgagtagcggattaccctcagggttataagaagacttatgggtgacatgcaggacgctaccgtcctgaatattcgaacgtgcgccgatagacacataattcacgtcgccgcggatggcgaccagcggccaaatgctgacgtcatcggcaattctgacatcgccgatcacaacgctgctgggatccaccatcacccgcagaccgatttgagggaataattctttataaggacgtaaataactggacatgactgcctcaacatcagggtagataaccagactttggtagctttcaggcgctcccgcaacccctttttctgataaaaattgagctatttgagcaataacagtgcgaaaagcgcgaaaaatcatcattcagaaaaaaagatcgaaaaaaggcttgtgcaaaaaaatgggatccctataatgcgcacccactgacacggcagatgtgaatcacttcacacaaacagccggttcggttgaagagaaaaattctgaaattcagggttgactctgaaagaggaaagcgtaatatacgccacctcgcgacagagcgctaaagcgcgtcgcaactgctctttaacaatttatcagacaatctgtgtgggcactcaaagtgacatggattcttaatgtcttcggacaataaatgaataccaagtctctgagtgaacatacgtaattcattacgaagtttaattcacgagcatcaaacttaaattgaagagtttgatcatggctcagattgaacgctggcggcaggcctaacacatgcaagtcgagcggtaacacagagagcttgctctcgggtgacgagcggcggacgggtgagtaatgtctgggaaactgcctgatggagggggataactactggaaacggtagctaataccgcataacgtcgcaagaccaaagtgggggaccttcgggcctcatgccatcagatgtgcccagatgggattagctagtaggtggggtaatggctcacctaggcgacgatccctagctggtctgagaggatgaccagccacactggaactgagacacggtccagactcctacgggaggcagcagtggggaatattgcacaatgggcgcaagcctgatgcagccatgcccgcgtgtatgaagaaggccttcgggttgtaaagtactttcagcgaggaggaaggcgttaaggttaataaccttagcgattgacgttactcgcagaagaagcaccggctaactccgtgccagcagccgcggtaatacggagggtgcaagcgttaatcggaattactgggcgtaaagcgcacgcaggcggtctgtcaagtcggatgtgaaatccccgggctcaacctgggaactgcattcgaaactggcaggctagagtcttgtagaggggggtagaattccaggtgtagcggtgaaatgcgtagagatctggaggaataccggtggcgaaggcggccccctggacaaagactgacgctcaggtgcgaaagcgtggggagcaaacaggattagataccctggtagtccacgccgtaaacgatgtcgacttggaggttgtgcccttgaggcgtggcttccggagctaacgcgttaagtcgaccgcctggggagtacggccgcaaggttaaaactcaaatgaattgacgggggcccgcacaagcggtggagcatgtggtttaattcgatgcaacgcgaagaaccttacctactcttgacatccagagaacttagcagagatgctttggtgccttcgggaactctgagacaggtgctgcatggctgtcgtcagctcgtgttgtgaaatgttgggttaagtcccgcaacgagcgcaacccttatcctttgttgccagcggtccggccgggaactcaaaggagactgccagtgataaactggaggaaggtggggatgacgtcaagtcatcatggcccttacgagtagggctacacacgtgctacaatggcatatacaaagagaagcgacctcgcgagagcaagcggacctcataaagtatgtcgtagtccggattggagtctgcaactcgactccatgaagtcggaatcgctagtaatcgtagatcagaatgctacggtgaatacgttcccgggccttgtacacaccgcccgtcacaccatgggagtgggttgcaaaagaagtaggtagcttaaccttcgggagggcgcttaccactttgtgattcatgactggggtgaagtcgtaacaaggtaaccgtaggggaacctgcggttggatcacctccttaccttaaagaacctgcctttgtagtgtccacacagattgtttgataaataataaatttcaaaatgtactgttaagtgcattgtgaaattttgctctttaaaaatctggatcaagctgaaaattgaaacgacacacagttaatgtgtgttcgagtctctcaaattttcgcgacacgtgggtgttttacgaaacatcttcgggttgtgaggttaagcgactaagcgtacacggtggatgccctggcagtcagaggcgatgaaggacgtgctaatctgcgaaaagcgtcggtaaggtgatatgaaccgttacagccggcgatgtccgaatggggaaacccagtgcaattcgttgcactatcgttaactgaatacataggttaacgaggcgaaccgggggaactgaaacatctaagtaccccgaggaaaagaaatcaaccgagattcccccagtagcggcgagcgaacggggagcagcccagagtctgaatcagcttgtgtgttagtggaacggtctggaaagtccgacggtacagggtgatagtcccgtacaccaaaatgcacaggttgtgaactcgaagagtagggcgggacacgtggtatcctgtctgaatatggggggaccatcctccaaggctaaatactcctgactgaccgatagtgaaccagtaccgtgagggaaaggcgaaaagaaccccggcgaggggagtgaaaaagaacctgaaaccgtgtacgtacaagcagtgggagcaccttcgggtgtgactgcgtaccttttgtataatgggtcagcgacttatattctgtagcaaggttaaccgtataggggagccgcagggaaaccgagtcttaactgggcgttaagttgcagggtatagacccgaaacccggtgatctagccatgggcaggttgaaggttgggtaacactaactggaggaccgaaccgactaatgttgaaaaattagcggatgacttgtggctgggggtgaaaggccaatcaaaccgggagatagctggttctccccgaaagctatttaggtagcgcctcgtgaactcatcttcgggggtagagcactgtttcggctagggggtcatcccgacttaccaacccgatgcaaactacgaataccgaagaatgttatcacgggagacacacggcgggtgctaacgtccgtcgtgaagagggaaacaacccagaccgccagctaaggtcccaaagtcacagttaagtgggaaacgatgtgggaaggcacagacagccaggatgttggcttagaagcagccatcatttaaagaaagcgtaatagctcactggtcgagtcggcctgcgcggaagatgtaacggggctaaactgtgcaccgaagctgcggcagcgacactatgtgttgttgggtaggggagcgttctgtaagcctgcgaaggtggcctgtgagggttgctggaggtatcagaagtgcgaatgctgacataagtaacgataatgcgggtgaaaagcccgcacgccggaagaccaagggttcctgtccaacgttaatcggggcagggtgagtcgacccctaaggcgaggccgaaaggcgtagtcgatgggaaacaggttaatattcctgtacttggtgttactgcgaaggggggacggagaaggctatgttagccgggcgacggttgtcccggtttaagcatgtaggcggaggttccaggtaaatccggtaccttattaacgctgaggtgtgatgacgaggcactacggtgctgaagtaacaaatgccctgcttccaggaaaagcctctaagcatcaggtaacattaaatcgtaccccaaaccgacacaggtggtcaggtagagaataccaaggcgcttgagagaactcgggtgaaggaactaggcaaaatggtgccgtaacttcgggagaaggcacgctgatatgtaggtgaagcccctgcgggtggagctgaaatcagtcgaagataccagctggctgcaactgtttattaaaaacacagcactgtgcaaacacgaaagtggacgtatacggtgtgacgcctgcccggtgccggaaggttaattgatggggttatccgtaaggagaagctcttgatcgaagccccggtaaacggcggccgtaactataacggtcctaaggtagcgaaattccttgtcgggtaagttccgacctgcacgaatggcgtaatgatggccaggctgtctccacccgagactcagtgaaattgaactcgctgtgaagatgcagtgtacccgcggcaagacggaaagaccccgtgaacctttactatagcttgacactgaacattgagccttgatgtgtaggataggtgggaggctttgaagcgtggacgccagtctgcgtggagccaaccttgaaataccaccctttaatgtttgatgttctaacgttggcccctaatcggggttgcggacagtgtctggtgggtagtttgactggggcggtctcctcccaaagagtaacggaggagcacgaaggttagctaatcctggtcggacatcaggaggttagtgcaatggcataagctagcttgactgcgagcgtgacggcgcgagcaggtgcgaaagcaggtcatagtgatccggtggttctgaatggaagggccatcgctcaacggataaaaggtactccggggataacaggctgataccgcccaagagttcatatcgacggcggtgtttggcacctcgatgtcggctcatcacatcctggggctgaagtaggtcccaagggtatggctgttcgccatttaaagtggtacgcgagctgggtttagaacgtcgtgagacagttcggtccctatctgccgtgggcgctggagaattgaggggggctgctcctagtacgagaggaccggagtggacgcatcactggtgttcgggttgtcatgccaatggcattgcccggtagctaaatgcggaagagataagtgctgaaagcatctaagcacgaaacttgccccgagatgagttctccctgagactttaagtctcctgaaggaacgttaaagacgatgacgttgataggtcgggtgtgtaagcgtagcgatacgttgagctaaccgatactaatgaaccgtgaggcttaaccttacaacgccgaaggtgttttggcgatttgagatgattttcagcctgatacagattactcgatgcgtcctgaggacgtgttgaaaacagaatttgcctggcggcgatagcgcggtggtcccacctgaccccatgccgaactcagaagtgaaacgccgtagcgccgatggtagtgtggggtctccccatgtgagagtagggaactgccaggcatcaaatttagcgtgctgatatggctcagttggtagagcgcacccttggtaagggtgaggtccccagttcgactctgggtatcagcaccactttttaggttaaagttcggcacttgtaaagaatttgcctggcgacgagagcgcggtggtcccacctgaccccatgccgaactcagaagtgaaacgccgtagcgccgatggtagtgtggggtctccccatgtgagagtagggaactgccaggcatcaaatttagcgtgctgatatggctcagttggtagagcgcacccttggtaagggtgaggtccccagttcgactctgggtatcagcaccactttttaggttaaagttcggcacttgtaaagaatttgcctggcgacgagagcgcggtggtcccacctgaccccatgccgaactcagaagtgaaacgccgtagcgccgatggtagtgtggggtctccccatgtgagagtagggaattgccaggcatcaaataaaacgaaaggctcagtcgaaagactgggccttttgtttttgtgttttgcggccagacgcgccgccatcttccctggtggcgctgcgcttaccggggctacagacccgtagcccgggaaaggcgcatcgcgccgcccccgggaaaatgaccatatcaatataaatgaaaggcccagtcgtgagactgggccttttgtctttctggcggctaagccaaagggaacgcatcccggctgtagcgtttgtggagaggtatcactaacgcgtaagcgccacgattcctaacgtgagaccggcaaccgctgcggccccaccggcgattgcgccagcggtttcccagttatcctgagttgtgccttttacacaggtattggtatgcaccagtcggccctgcgagtcatagaccggcacgcacggggaatcatgggcacagccagcaagcaacgttgctaacaatgtcactaatattaattttttcatggtattacctctaaataaccgtttgcagtcaacgatgtcaacacataacggaatagcttattttaccaccgcaatgacccaggcccggaaggggaaataatctcaaattatgagcagagtaaatatcgtgaagagaaatgagaaataatgaagaaaatatgtagaaagggatatttcaatgcgtcaggcggggatgggaattaatatttctactaacttattgttctgatagatataaaaaaaggcgccgcgtggcgccttgataatgatagtcgattattctgcgtggcgggtaaagcgacgccttacaaccacaaagaacaccggtacgaagaagatggccagcagcgttgcggtaagcataccgcccatcacgccggtaccgacagcgttttgcgcgccgctaccagcgccatggctaattactaacggcatgaccccgagaataaaggctaatgaagtcattaatatagggcgcagacgcatacgggatgcttccagggtcgcctcgataatacctttgccttctttatccataaggtctttggcgaactcaacaataagaatggcgttcttcgcagataaaccaatagttgttaacaggccaacctggaaataaacgtcattattcaatcctctaactgaggctgctaataatgcgccgataactcctaatggcacaaccagcataacggagaatggaatagaccagctttcatagagtgctgccagacagaggaagacgactatcagcgaaatagcatatagcgctggcgcctggttacctgataaacgttcctgataagacaagcccgtccagtcataaccgatacctgcaggcagtttactggccagttgctccatcaaggccatggcttccccggtactcttacccggagccgcttcgccgaggatttccatcgaaggcaggccgttgtaacgttcgagacgcggagaaccatatacccaacgtgaagtaacaaatgccgagaacggcaccatttcaccgttagagctgcggacatacatgttattgatatcaccgggtagcatacggaaactggcatcggcctgaacatagactttcttcacgcggccgcggtcaataaagtcattcacataatagccgcccagcgcagctgatatcgtttcgttaatgtcggataacgagacgcccagcgcctgcgctttctcttgatcgacgtcgagtttaaactgcggtgtatcttcaaggccattagggcgaacgcgtaccagctgttccggatgctgttttaccatccccagaagctggtttcgtgcctgagttagctgtgtgtgtcctaagccaccctggtcaatcagctcaaagtcgaaaccggtcgcggtacctaactcgatgatggccggcatgttgaacgggaagaccattgcatctttaatctggctaaatgcggcggtggcacgcttaataatggcttcaacgccgttttccgaaccgctgcgctcttcccatggtttcaaactgacaaacgccataccggagttttgtccttgtccgctgaagctaaagccgttaacagtgaacacgctctcaacattagctttctctttctgtagatagtagtcgctgacggagtcgagcaccttttgcgtacgctcttgcgtagcgccagcaggtaactgaaccatggtcaggaacacgccctggtcttcatcaggcaggaaggatgtaggcaagcggacaaacagcattgccatgccgataacgatcagcagatagataaccaggtagcgcccggtgccgcgcaggatcccgcttacgctgttggtgtagtggttaacgctttggtcgaacctggcattaaaccagccgaagaacccctttttgccatgatggtctgcggatgctggctttaacatggttgcgcatagcgccggggtcagtaccagcgcgaccagtacagacagcgccatcgcggaaacgatagtgatggagaactgacgataaatcgccccggtcgagccgccaaagaaggccatcgggacgaataccgccgagagcaccatggcgataccaaccagcgccccctgaatctgctccattgatttctctgtggcttcaacgggggaaagcttgtcctcgaccatgacgcgctcaacgttctctaccaccacgatggcatcgtcgaccagtagccctatcgccagcaccatgccaaacatggttagcgtgttgatggagtagccgaacatcgccagcaccgcaaaagtacccagcaagacgaccggcacagcgatcgtcgggataagcgttgcgcgaatgttctgcaggaacagatacatcacgaggaagacgaggataatggcttcaaacagcgttttgaccacttcgtgaatggagattttaacgaacggcgtggtgtcgtagggataaacaactttcatcccttgcgggaagaagggctgcagctcggcaagtttcgctttaatcgccgtagcggtatctaacgcattggcgccggtcgccagcttgatccccaaaccagaggcgggtttgccattaatgcgcgcgacaacgttatagttctcgccgcccagttcaatgcgcgcgacatccttcaggcgaaccacggaaccatcggcgttaacccgcagcgtgactttaccgaattcctcaggatctttcaggcgagtctgagcaatgatcgaggcattaagctgttgacctttaaccgatggtgtaccgccaagctgtccggcggcgatctgatcgttttgcactttcagctggttgataacatcaaccggcgtgaggttatatttattcagcaggttgccgtcgagccagatacgcatggcatattgcgcaccgaacaactgtacatcgcccacgccgttaaggcggctgatagggtctttgatgttggaggcaacgtagtcggaaatatcatcctgggtagtgctttgattatcagaaataaatccggcaaccagcaggaagctgctactggatttctcaacgctaataccttgctgctgtacttcctgtggcagcagcggcgtcgccagttgtagtttgttctgcacctgcacctgggcgatatccggatcggtgccggattgaaaagtgagcgtgatggtcacgctaccggatgaatcactggtagaggacatgtacatcagattatcgataccattcatgttctgttcgataacctgggtgacggtgtcctgcacggtttgcgcatctgcacccgggtaggttgccgagatggctaccgcgggcggcgcaatcgtgggatattgcgcgataggaagctgcatgatggcgaggccgccggcaatcatcatgatgatcgccagcacccatgcaaacaccggtcgatgaatgaagaacttagacatagcgattcataccttattgtgcggcggaggcagcggtatcttccgtcgccttcacggtgacgcctgggcgaaccttctgtaacccactaacgatgactttgtcgccgttttgcaggccgctggtgattaaccatttatcgcctatcgcctgggcggcggtgacttctcggttttccacctggttctgcgcattaacgattaacacagtggcatcgccgcgcggcgtgcgggtaaccccctgctgcggtaccagaatcgcctgcggattgacgccttcatcgatacgggcgcggacaaacatgcccggcagaagagtgtgttgcggattagggaataccgcgcgcagcgtaatggatccggtgctttcatcgacggtcacgtcagaaaattgcagcgatcccttcagggaatagggttggccattttccataatcagctgcacgcttttactgtcatcaccgcgctgcaggctttcctgtttcaggcgcataaaatcgttgctggattcggttacgtcgacatagatcggatcgagttgctgcaccgtcgccatggcgtccgcctggccgttggtcaccagtgcgccttcggttacgctggatttaccaatccgcccgtcgatgggcgaggtcaccttggtgtaagccagattgatacgggcgttttcgaccgcggccttagccgccacgacatcggcatcggcctgacgcgcggtagcgacggcctgatcgtattcctgctgactgatgtactgcgtcccaagcagaggaacataacgtttcaccgtcagatgggcgatagccgctgcggcttcggcttttgcctcgtcgcctttggcgctgttccaggccgcctggtaagtagctgggtcgatttgatagagcgattcaccggccttgatatcgctgccttcgacaaagttgcgtttcaggataataccgctgacctgagggcgaacttcagcgacacggaaggccgacgttcgccctgggagttcagtggtgacggaaagcggttcgctgtgcactacatgtacgctaacctgtggcgcctgcggttgtgcctgctggttgcctgaattatcgcaaccggtaagcaatacggcggagataattaggctggataaaagagaaactctggcatgactcgtcattgctgttccttatagattacgggccggatagggcggcgaatctgcgaagaaataatgaatattaaagcggttcgttatcctacaaataaacatcggtggatgtaaggaatagttatttttgagcaataaacaaggcacgtaaaaacaaaaaaaaggaggttgatttcgttgtgtcttctttaatatttattttgtgaatgtattcttattttatatttatcgcatgtattaaattctcgtgtaattaaatttcagtatctgcatttttgctaaataatattttttatggaatgctaaattggctggtgtatcagtcaattctgtattcaccgttaggtagcgagtgggaaaaggttatggccagaaaaaccaaagaggacgccttaagaacgcgtcaactcctgattgagtccgccattcagcagttcgcgcagcgcggcgttaccaataccacgctgaccgatatcgctgacgccgcgggcgtcacgcgtggagcggtgtactggcatttttccagcaaggcggagttatttaatgagatgtggcagcagcagccgccgctcagagagctactgccccatcaacagtgggagctggataaccaaaatccgttaacagggttacgtaaaaaatttattaccggattacaatatatcgctgagaactcccgacagcaggcactgctacaaattctttatcataaatgcgagtttactagtgacatgctgccggaaagcgaaatccgcaaacgaattggcttcaattacgccataatccgtgacgtcctgcagtgttgcgtaagaaatagattattgccggcggaaacaaatatcgaaattacgttgataatattacacggcgcttttacaggaattatcaaaaactggttaatggatcctgaacaattcaatctctatcagcaggcgcccgtgctggtagacaatattatgtcggcgttatcgctgcaacaacctgaccatagcgtgtggccaatggctgccgtggggcagtagttcagtataaaaatcaggtataaaaaaaggcgcttccccatgccgaagagcgcctttttaattcagcaatttactgattaatatcagttcatgccgtattttttcagtttcttacgcagagtaccgcggttgatacccatcatcagggcagcgcgggtctggttaccacgggtgtattgcatcaccatgtccaacagtggctgttcaacttcagccaataccagctcatacagatcattaacatcctgaccattcagttgagcaaaatagttcttcagtgcctgtttaaccgagtcacgcaggggcttttgagttacctgatcctgagagttaacggtagaaacggtcagtacgtcagaatttacgcgttgttcgaacatagttctgtcagctctttatttctattacgcaaaattttcgaagtatgcctccaacgcctccagctgttcgctggcatcctcaatggcgttgaatgtgcgccgaaactggtcatttggagcatgctcctggagataccaggagacgtgtttacgcgcgattcggtacccttttgcctgaccgtaaaagtcatgcagttcccgaacgtgcgcgcaaagcaagcgcttaacctctgccaacggcagggggggcagcaactccccagtgtccagataatgctggatttcccgaaagatccagggtcttccctgagccgcacggcctatcatgagagcgtcagcccccgtgtagtcgagcacggctctggctttaagcgggtcagtaatgtcgccattcgcgataatcggaatggaaactttctgcttaactgcccgaatactgtcgtattcagcttctccgttaaacaagcaggcgcgagtgcgtccgtgaatagtcagagcctgaatgccacattcttcagccagttgggcaatctctacacagttacggtgttccggttcccaaccggtgcgaatcttgagagtcaccggaacgtccactgccttgacgaccgcggtcaggattgacttcacctgatcgggatactgcaagagggctgaaccagcaagcttacgattcacctttttagccgggcaccccatattgatatcaataatctgggcgccgctttccacgttaatacgggcggctgcggccatctcttccggtacgctaccggcgatttgcacggtacgaataccgggctcatcaatgtgcaccatccgtaaccgggacttgtcgctctcccatacctgcgggttggaggacatcatctcggagacggttaaacctgctcccatctcgtaacacagcgtcctgaatggtctgtcagtgatgccagccataggtgctgcgatcaggcgatttctgagctggtggtgtccgatgcgcatgagttaagaaatgaccatactgtgactgcaaggcggcgtatattacgcattttttgcgcgagatgaaaggccaaactttgaccaatcctctgttacagatcaatgaatccaggagtaacgtaatagccatgaataaattatcatattaatcattatgttattaccagcgggataatttgtgtccaattataaaatcacaaaacttctcgatttttctgagatgaaggcgatacgagacgggataaaacgctgtttttgtagccaaaaaagggcatcgtaatgcgatccggctctcatttcctggcaatattcggcggttactggaaacaaaaatgcggcccgtaggccgcagtcttacttagtttttctgtccggtaattcggcaccactcctctttctccaccaccgggtcgagggtgaagagcggggcgtaggcttcgcagacgctttccgcctgacttgccaggattccggaaaggccaagcaggccgcctgtaaccggcaagacgctgattaaaggggccagctcacgtaacgggcctgccaggatgtttgcgaccaccacatcggctttcagggcttctggctgatcctgcggcaaatacagttcaaggcgttcggagacgccgttacgctgggcgttatcacgactggcctgaatggcctgcggatcgatatcaataccgatagctttggcggcgcccagcttcagcgcggcgatcgccaggatgccggaaccgcagccaaaatcgataactgttttgccctgcaggtcaaggccgtcgagccattgcagacacatcgcggtcgttgggtgagtgccggtaccaaaggccagtcctggatcaagcatcacattgactgcattctcatcaggaacatcgcgccagctcgggcaaatccacaggcgttcgccgaaacgcatcgggtggaagttatccatccactcgcgttcccagtctttatcttccagttgttcaattttatgcgcgaagccggcgccgagcagcggatgctgctcaaggatagcaaccgcttcgttcatgtcgctttctgcgtcgaacagaccgataacgtcggtatcgccccacaaacgggtttcacccggcagcggttcgaacaccggcgtgtcgtgggtgtcctggaaggtaatcgagaccgcgccggcctccatcagcgcgtcgctcagttcttccgcgtgagcgccggtcgtattcagttttagttggatccaaggcatggcaaaactctttatttatcagtagtcataataggggctggtggtacgggttgaccgaagcggttcccgacgacaaaagccaacaaacttagcagcagcgagggcacgatagggtggaagcccaggtactgaatgttaaacgtcgcgagcacggcatacagtatgccgcccactaacatcgcgctgagcgcgccggcagcgtttgcccgctcccagtaaaggcccaataccagcggccataagaacacggcttccaggccgccaaaggccagcagattaagccagataatcatttccggcggccgccaggcggccagcatcataagtatgccgagcactaaggtggcgatcgttgagatccgcttcagcttctgctcgttacgctttttcgtcggctgagcgctgagccacagatctttaatgatcgtagccgatgcctgcagtaaatgggcgttaacgttagacataatcgcggccatcggcgccgctaaaaacagccctgcggcccacggcggcagcacttgaaccatcaacgtcgggatcacctgatcgggcacggtgaggcccggcaggacggcgcggccaagagcgccggcgagatgcataccgaacatcagaatcgccacgacgatggtgccaataacgatcccgcggtgtacggccttgctgtctttataggagatacagcgtacggcggtatgcggcaagccgatgacgccgaaacagaccagcacccagaacgaggtcataaaggttggcgtgaggatatcatcggcgccgtggggcgacaccagctgcgggtcgatttgctggagtgtttctaccgcctgatgcaggcctccggcggcatgcactacaccaaccagcaggacgatcgttccgatcaacatcaccatcccttgcatggtatcgttgagtacgctggcgcggaagccgccaaaagcggtgtagagcgcaattgtgataccaaatatcaatagtccggtttcgtacttgatcccggcggcggtttccagcaggcgcgcgccgccgataaactgcaccgcgatggccccaacaaaggccaccagcaagctgacgctggcaatccataccaccgcgcggctttggtagcgcgcctgcagcatatcgttaagggtaatggcattgtagcggcgcgccaggatcgcgaacttcttgccgaggatcccgagagagagccagatcgtcggtacctggatcatcgccagcagtacccagcccagcccatatttgtaggcggcgccagggccgccgataaacgagctggcgctaatataggtggcggtgagggtcatggctaatacaaagccgcccatcgatcggctgccgaggaaatactcgctcaggaagttcccggtactgcgtttacgcatcgcgtaaagagacagcccgaagacgacaaacagataagcgatcagcaccacgataatctcaagctgcatcgttatcctccagagagatatcgcggaagataaagcgcaccatcgcccagcacagcaggacgaacagcagcggcaccagcaggcaggccagttcgaaccagtgcggcaggccggtaaagccgataccgacgccaggcagataggccgcagccagccacgcggcaagatagagaagggtcagccacagcgcccagcgcgcttctttatgggcctgaacaaatcttttgtccattttttgtcccttgaggatgaagaaagcggggattgtaccgcatggaaaagtcgaggggagagaaaaagaaaaaaggccggattatccggccttttgcagcgagtacaggattatttttcctgcagtccgagttttttctccagatagtggatattggtgccaccatgctggaagttctcgtcgctcataatgcgcatctgcagctcaacgttggttttgatgccatcgatgatcaattcctgcagcgcgtttttcatgcgggcaatcgccacgtcacggctttcgccgtagcagatcagtttaccgatcattgagtcatagtacggcggtacggtgtaaccggcgtagatatgagactcccagcgcacgccaaaaccgcccggcgcgtggaagcgggtaattttacccgggctcggcaggaaggtattcgggtcttcagcgttgatacggcattccaccgcatgaccgcgaacctgcacttcttcttgcttgatagacagcggctgacccgccgcgatgcgcagctgttctttgatcaggtcaacgccggtgatcatttcggtaaccgggtgttctacctgaatacgggtgttcatctcaatgaagtagaactcgccgttttcaaacaggaactcaaaggtacccgctccgcgatagccgatatccacacaggctttcgcgcaacgttcgccgatgtagcgacgcagttccggggtaatgcccggcgccggcgcttcttcgacgactttctggtgacgacgctgcatggagcagtcgcgttccgccagatagatagcgttgccctggccgtccgccagcacctggatctcgatgtgacgaggattttccaggtacttctccatatagaccatgtcgttgttgaaagccgctttcgcttccgctttggtcatggagatggattgcgccagttcagcgtcgctgcgcacgacgcgcatgccgcgaccgccgccgccgccggaggctttgatgataaccgggtagccgatgcgtttggcatgcgcgcggttagcgtccatgtcgtcgcccagcgggccatcagaacctggaacggtcggaacgccagctttcttcatagcggtgatggcggacactttgtcgcccatcaggcggatagtgtcggctttcgggccgatgaagatgaaaccggagcgctcaacctgctcggcaaagttagcgttctcggaaaggaaaccgtaacccgggtgaatcgctaccgcgccggtgatttccgctgcgctgatgatagccgggatgttcagatagctttttacggacggagccgggccgatgcagaccgtctcatccgctaataatacgtgttttaaatcgcgatccgcggtggagtgcacagcaacggtcttgatgcccagttctttacaggcacgcaggatgcgcagtgcgatctcgccacggttagcgatgacaattttatccagcatgttcgcctcgttactcgatgacaaccagcggctcgtcgaattctacaggttggccgctttcgatcagaatggctttaaccacgccggctttgtcggcttcgatctggttcatcattttcatcgcttctacgatgcacagggtgtcgcccacgttaactttctgaccgacttccacaaaggctttcgcgtccgggctcggggtgcggtagaaagtaccgaccatcggggaacgtacgatgtgaccactgatttccgctttcgcttcagcggcaggtgctgctgccggcgctgcggcggctggcgcctgaggctgggcgattggcgcagcataggcttgctgcattaccggatagctagcagccggcgctgcacggctgatgcgtacagactcttcgccttcagaaatttccagttcggagatgcctgattcttcaaccagctcgatcagttttttaatcttacgaatatccatgagtgggttccgtactctttgtttagtgtgtttgtgacaggcgttttaccgccgtctgtaaagcgtatgaatagccgtccgcacctaatccgcagatcacgcccgaggcgacatcagacagatacgagtggtgacggaacggctcgcgcgcatgcacgttgctcaggtggatctcgataaacgggatactcacggcaagcagcgcgtcgcggatggccacgctggtatgcgtaaacgcggccggattgatcaggatatagtccacagagtctttagcctgatgaattcggtcgatgagcgcgaactccgcattggattgcaggtggtcgagcgtcacgtttagcgcttccgcttctgcggttaaacggttaacaatttctgccagcgttagcgaaccatacttctcgggttcacggctgccgagcatattaaggtttggtccgttcaaaagcaaaatgcgaaacttgtcagccattgtgcagctatctcctgctaacctcgggtaaaaaacaaaatataccttcgatacgcgcttgtcaccttttcagggttcgaaaaccccttcaggaaaaccaaagtcgcacattataacgatttcgtagcaattggcagctaaatactggtcttatcagggaagattatcaaccgctatcgtaaaaagagtcgcggttgataaacgttatgcggggaactgcacatatccggagattagcgccaccactggcgaaacttcttgtagcggctggctaaaagtaccgttgccagcccggcataaatcagcggctgcggcgatataatcttcaccgaccacagataatgtataggggcgaggatcgccaccagatagacgaagttgtgcaatgtttgccaacgacggcctaattttcgttgcatgtactgggttgacgtcgccgccagcgccagtaaaaccaaccaactgattaaaccaagcgtgagatacggacggttgattatctcggaaccgagtagcgccagattgttaatgccgagctccagcagcgtatagctggtgaggtgcaacgtggcccaggcaaagcaccataaccctaataaccggcgggtgcgtatcaataatggctgtttagcgtagcgcgccagcggcgtaataagcaaggtggcgagcaaaaacttcagcgccatccggccggtaaaatgctggatatcctttgccggatcggcgctgaaatagccctgatgtccggcccagaacagccagacaagcggtaaaaaaccggctaaatgcagcgcaactttcagccaacctatctgtttaacgctcagacgcactagaaattctcccgtaagttaagcccgcgatacagcgaggcgacttcctcggcatagccattaaacagcaacgttggctggcgttttacgtcgagtacgccgccggcgccgataaaccgctcgctggcctgcgaccagcgcggatgatcgacgtgcgggttcacattggcatagaaaccgtattcatccggcgccgccagattccaggtggtcggcggccgctcgcgggttaattcgatgctcacgatagatttaatccctttaaagccgtacttccacggcacggtcaggcggatgggggcgccgttttgcggcggcaacgctttcccatagacgccaacgctcatcagcgtgagcgggtgcatcgcttcatcaaggcgcaacccttcgacatagggataggccaggccgccgccgatgaagcgatctttttgtccaggcatttgttctggcgcatacagcgttttgaaagcgacgtagcgggcgttgctggtgggctccaccagcgcgagtagtttatgcagcgggaagccgacccacggcacgaccatcgaccaggcctccacacagcgcatccgataaatacgctcttccagcgggaaacgacgggtcaggtcgtcgtgatcgagcgtcaggggtttggcgacttcgccgccgatggtaagcgtccaggggtcagtgcgcaggctgcctgcgttagcggccggatcggctttatcgaggccgaattcataaaagttgttgtagccggcgactttatcttccggggtgagggcgagcttactttgccatgctgcgggtttatcaaaggtcagcgcctttccggcaggcgccggcgggcgatcgtggcctttaaaccaatcgagcaggtcggcatgggccttcgttgagagcgacatcgccgtcgcgccgataccgagcattttcagcacctggcggcgctgcaggttaaataccgattccgccgttacgtcggcttccgtcagttttctggttttcatggcgtcctccgtcatactttttcctaagcatgacggaggcgcagcgcgatcgcgaatatgtcacgaaaaattgcagattagccgattttgaccagcgtacgtccctggatctggttgttcatgattttgtcggcgaaggccggggcatcggccagggtgatttcggtcgcgctttgcgcgtaaaaaaactccggcagatcgcgcaccagccggcgccaggcttctgcgcggcgcgcaggcggggtcattaccgaatcgacgccctgcaggcgtacgttgcgcaggataaacggcatcacggtggtcggcagcgcgaaaccgcccgccaggccgcaggccgcgacgcagccgccatagttcatctgcgccagcaccttagccagcactttatcgccgacggtatcgatagcgcccgcccagatttgtttttccagcggacggctctcagcgaactcgtcgcggcccagaatacgctgcgcgccgaggcttttcagatagtcatgggtgctttcgcgaccggaaaccgccgccacctgataacccagatgatgcagcagagcgactgccgtgctgccgacgccgccgctggcgcctgttacgacgatctcgccatcctgcggacgcacgccggcgtcttccagcgccatcacgcatagcatggcggtaaaacctgcggtaccgatcgccatcgctttgcgtccgtcgagaccttcaggcatggccaccagccattcgcctttgacgcgggcgcgctcggccaggccgccccagtgattttctcccacgccccaaccggtgagtaatacctgctggccaacgtgaaaacgcggatcttcgctggcgtggacggtaccggcaaaatcgataccaggaatcatcggaaagttgcggataatttttcctttgccggtaatggccaacgcatctttataattgaggctcgaccagtgaatatcgacagtcacatcgcctggcggcaacaggttggcatcgatgttttgcaccgaggaaagggttttgccatcctgctgttctaaaattaatgcctgcatatgtggttcctcgcggtttgaagattggaaaaattattctgcagactatactcgctaacggcattattacgtggatgtaacgcaataaattgccagatacgccagctttggtagtatgcgtcgcttcagaaagttagtacttacttaagaaaaagtctcaaaaggggcccgaatgcccatcgggtagttattcacacgcggagttaacacagggatgcgattaacgacgaaattctcagcatttgttacgctgctcaccagcctgacgatttttgtcacgctgatcggcgcgtcgctgagcttttacaacggcattcagattaaggttgagaatcgcgtacaggcggtggcgacgatgctggatagccgcctggtgaccacctcttttgagaagctcgaaccgcaaatggatgagctgctcacgccggtagaagtcgaacatattgattttctgctcaacggcaaatcgctttacagccatacccgcggtgatagttaccgtccgctgggcagtaacaatcagtatcgtgaaatgacggtaccctcgctcaaacatcccggaatctcgattcgtctggtctacatggacccgatggtcaattacttccgctcgcttcacgtcaccgcgccgctctccttcgccatcggcttcatggtgctgattatcttcttttcgattcgctggatccgccgccagctggcggggcaagaactactggagctgcgcgcgcgacgcattctcagcggcgagcgcgggccgcaggtgcgcggttcggttcatgaatggccggccagtaccagcagcgcgctggatatgctgctctcggagctgcagttcgccagcgatcagcgcagccgcatggataccctgattcgctcctacgccgcccaggattccaaaaccggccttaacaaccgcctgttctttgataatcaactggcgacgctgctggacgatcaggaaaaagtgggggcgcacggtatcgtgatgatgattcgcctgccggagtttgatctgctgcgcgacaactggggacgggcggcggcggaagagcattacttcacgctaattaatctgctgtctacttttattatgcgttatcccggctcgctactggcgcgctatcaccgtagcgatttcgccgtcttattgccgcatcgcactcttaaagaggccgatagtatcgccgggcagttactgaaggcgatggatgcgctgccgtcaacgcgggtgctggataaagacgacacgatgcatatcggcatctgcgccttccgcagcggccagtccacctctcaggtgatggaacacgccgaagccgccacccgcaacgccgtgctgcaggggagtaatagctgggcggtttacgatgattcgctgccggagaaggggcgcggtaacgtgcgctggcgaacgcttatcgagcagatgctcagccgcggcggcccgcgcttgtatcagaaaccggcggtcatgcgcgatgggcgggtacatcatcgcgagctcatgtgccgcatctatgacggtaaagaagaggtgattgccgccgagtatatgccaatggtgcagcagtttggcttagccgaagagtacgatcgcctacagattacgcgtttgctgccgttattaagttattggcctgatcaaacgctggccctgcaggtgaccgtggagtcgctgattcgcccgcgtttccagcgctggctgcgcgataccatgatgcagtgcgaaaaatcacaacgtcggcggattatttttgaacttgcagaggcggatgtttgtcaatatatcggccgtttacacccggttatgcggttgataaacgcgctgggcattcgcgtcgctgtggttcaggccgggttgacgctggttggcaccagttggatcaagcagctggacgtagaagtgatcaagctgcatcaagggctatcgcgcaatattgaaaaacgcagcgagaaccagttactggttcaaagtctggtggaagcctgtaaagggatgccggtacaggtttttgccacgggagtacgcagtcgcagcgagtggcaggtgctgtcgcaatgcggcgtgaccggcggtcagggggaattttttgccgcctcacagccacttgacacaaatgtgaaaaaatattcgcaaagatactcggtttgatctgccgtttggcgtgatttcacgtagaataacgcgcgccatagtaaagggggtgtgcttgtctacccgccggaatgtcgcaacttacgcaagactgacctttgacaggtacaaacagagcacggagcacagctgatttattcagcgccgaagggacttcgtaaatgtttgtaacaaaggaaatgaactgcactaattttcaccgtagcagatgatttttgcgccttgtcgctgctgcgtgtggttggtaaagtaagcggattttgttttccgccccagctttcaggattatcccttagtatgttaaaaaaatttcgtggcatgttttccaatgacctgtccattgacctgggtaccgcgaatacccttatttatgtaaaaggacaaggcatcgtattgaatgagccttccgttgtggccattcgtcaggatcgtgccggttcgccgaaaagcgttgccgctgtaggtcatgaagcgaagcagatgctgggccgtacgccgggcaatatcgcggcgattcgcccgatgaaagacggcgttatcgccgacttcttcgtgactgaaaagatgctgcaacactttattaaacaggtgcatagcaacagctttatgcgtccgagcccacgcgtgctggtgtgcgtgccggttggcgcgacccaggttgagcgtcgtgctatccgcgaatccgcgcagggcgctggcgctcgtgaagtcttcctgatcgaagagccgatggcggccgcgatcggcgcaggcttgccggtttctgaagcgaccggttctatggttgttgatatcggcggcggtactaccgaagtcgcagttatctccctgaacggcgtggtctactcttcttccgtacgtatcggcggcgaccgtttcgacgaagccgtgatcaattacgtgcgccgtaactacggttccctgatcggcgaagcaaccgctgagcgtatcaaacacgaaatcggttccgcttacccgggggatgaagtacgcgaaatcgaagtgcgcggccgtaacctggctgaaggcgttccacgcggcttcaccctcaattccaacgaaatcctcgaagcgctgcaggagccgctgaccggcatcgtcagcgccgttatggtcgcgctggaacagtgcccgccggagctggcatccgatatctccgagcgcggtatggtcctgaccggcggcggcgcgctgctgcgtaaccttgaccgtctgttaatggaagagacagggatccctgtcgtagttgcagaagatccactgacctgcgtcgctcgtggcggcggtaaggcgctggaaatgatcgatatgcacggcggcgacttgttcagcgaagagtagtcagcctgaaggtctggggcagcttaagggctgcctctggtctttactgacacgagaatacgcatagcctatgaagccaatttttagccgtggcccgtcgctacagattcgccttattctggcggttttggtggcgcttggcgtcattatcgccgacagccgcctgggtacgttcagccagattcgaacgtacatggatacagccgtcagtcctttctactttatctcaaatggtccccgggaactgctcgacagcgtatcgcaatcgctggcgacccgcgatcagctcgaactggaaaaccgcgcgctgcgtcaggaactgctgttgaaaaacagcgatctgctgatgctgggtcaatacaaacaagaaaacgcccgtctacgtgagctgttaggctcgccgctgcgtcaggatgagcagaagatggtgacccaggttatctcgacggttaacgatccctacagcgatcaggtcgttatcgacaagggcagcgtcaatggcgtttatgaaggccaaccggtcattagcgacaagggcgttgtcggccaggtggtggcggtagcgaaaatgaccagccgcgtgctgctcatttgcgatgcgacccatgccttgccgatccaggtgctgcgtaacgatatccgcgtcattgcagccggtaacggttgtactgatgatttacagcttgaacatctgccggcgaataccgatattcgcgtcggcgatgtgctggtgacctccgggctcggcggacgcttcccggaagggtatccggttggggtagtctcctcggtacgtctggatactcagcgtgcatacacggtgatccaggcccgtccgaccgccggactgcagcgtttgcgctatctgctgctgctgtggggcgccgatcgcaacggcgctaacccgatgactccggaagaggtgcaccgcgttgccaatgagcgcctgatgcaaatgatgccgcaggtgctgcctgcgcctgatgcgatggggccgcagatgccggcgccggcgacaggcctgacgccgccgccgtccgcgcaacctctgccagcaggggggcaatagtggcaagttatcgtagccagggacgctgggttatctggctctcgtttcttattgcgctattgctgcagattatgccctggccgcaggacatcaccgtcttccggccaaactgggtgttgttgattctgttgtactggatcctcgcgctgccgcaccgggttaacgtcggtaccggatttgtgatgggggcgattctcgacctcatcagcggttcgaccctcggcgtacgtgcgctgtcgttaagtattgttgcctatctggtcgctttaaaatatcagctgttccgtaatctggcgctctggcaacaggcgctggtggtcatgctgttgtctcttgccgttgatatcattgttttctgggcagagtttttagtgatcaacgtctctttccgtccggaagtgttctggagtagtgtagtaaacggtgtgctctggccgtggctattcctgctaatgcgtaaagtgcgtcagcaatttgcggttcaataaaggttgatatgacaactctgtatctggcttctggttccccgcgtcggcaggaactgttaactcagcttggtctctctttcgaacgtctggttccgggtattgaggaacgacgcggcccgcaggagagcgctgcgcattacgttgcgcgtctggcgcgagaaaaagcgctggctggcgtggcgatggcgccgcgcgatctgccggtgttgggggcggatacgattgtcattcttaacggcgaagtgctggaaaagccgcgcgacgccgggcacgccgcagaaatgcttcgcatgctttccggaaaaacccaccaggtgatgaccgcggtggcgttggcggataagcagcaaacgctggattgcctggtggtgacggaagtgaccttccgtctgctctccgagcaggatatcgctacctacgtagccagtggcgaacctttagataaagcaggcgcatacggtattcaagggttgggtggttgttttgtcaggaagataaatggcagctatcacgccgtagtcggcttaccgctggtggaaacgtatgagttgctgagtaactttaactcactgcgtgaagaaaagggataaagatgacggctgaattattagttaacgtaacgccatccgagacgcgcgtcgcgtatatcgatggcgggatcctgcaggaaattcatattgagagagaagcgcggcgcggaatcgtaggcaatatctacaaaggtcgtgtcagtcgtgtgttgcctggaatgcaggcggcttttgtagatattggcctggataaggccgcctttctgcatgcttccgatatcatgccgcacaccgagtgcgtggcgggtgaagagcagaagcagtttaccgttcgcgatatttccgagctggtgcgtcagggccaggacctgatggtgcaggtggtgaaagatccgctgggcaccaaaggcgcgcgtctgaccaccgacattaccataccttcccgctatctggtctttatgccgggcgcttcgcacgtcggcgtatcgcagcgtattgaaagcgaggccgagcgcgaacgtctgaaaagcgtggttaccgaatattgcgacgagcagggcgggtttattatccgcaccgcggcggaaggcgtacatgagcaagagatggcggcggatgcggcctaccttaagcgcgtttggaccaaagtcatggagcgcaaaaagcgcaaccagacccgctatcagatgtacggcgagctggcgctggcccagcgcgtgctgcgcgatttcgccgacgctcagcttgaccgcattcgcgtggattcgcgcctgacctacgaggcgctgctggagttcaccgcggaatacattccggaaatgaccagcaagctggaacattacagcggccgccagccgattttcgatctctttgacgttgagaacgaaatccaacgcgcgctggagcgtaaagtcgagctgaagtcaggcggctatctgatcatcgatcagaccgaagcgatgaccaccatcgatatcaataccggggcgtttgttggccaccgtaatctcgacgacaccatcttcaataccaatattgaagccacgcaggctatcgcgcgccagctgcgtctgcgtaacctgggcggcattatcatcattgattttatcgatatgaataatgaagatcatcgtcgtcgggtactgcattccctggagcaggcgctgagtaaagaccgggtgaaaaccagcattaacggcttctcgcagctggggctggtcgagatgacccgtaaacgcacccgcgaaagcgtggaacatgtgctgtgtaacgagtgtcctacctgtcatgggcgcggcacggtaaagtcggtcgaaacggtctgctatgagatcatgcgcgaaatagttcgtgtgcatcatgcgtatgactcagaccgcttcctggtctatgcttcacctgccgtcgcggaagcgctgaaaggggaagagtcccacgcgctggcggaagtcgaaatctttgtcggcaagcaggtcaaagtgcaaattgagccgctctataatcaagagcagttcgatgtggtaatgatgtaatcattcagcctgtcgctcccgacggcgtcgggggcggtaaacaggcgggctgaaggataaagcgtaacaggctgacaaggagagatgcgttgaggcgatggcccgggatattactgctcaccgtggcaaccgtggtggtgattgttgcgctactggtgagtggcctgcgtctggcattgccgcagctaaataactggcgtccccaactgctggagaaaattaccgcggtatccggggtcgcggttgatgcctcacagatcaacgccaactgggaaaacttcggcccgacgctggacgttcgcgatattaaagccaccttgaaagacggtggcgaaatgacgatcaaacgggttacccttgccctcgacgtctggcaaagtctgctacatatgcgctggcagttccgcgacctgaccttctggcaactgcaaattcacaccaatacccccatccagactaacgacgacggcgccagcctgaagaccgatcgcatcagcgatctgttcctgcgccagtttgaccactttattctccgtgatagccatttgagcttcctgacgatttccggccagcgtgctgaactggcgatcccacagctgacctggcttaacggtaaaaatcgccaccgcgccgaggggcagctgagcctttcgagcctcaccggccagcacggcgtcatgcaggtgcggatggatttacgtgatgagaacggcctgctcaacaaggggcgcctctggttacaggccgacgacatcgacgttaaaccctggctcgggcgctggatgcaggacaacatcgccctgcagagcgcgcgctttagtctcgaaggctggatgaccatcgataaaggcgatgtcgccagcggcgatgtgtggctgaaaaaaggcggcgccagctggcagggcgataagcatctgcatcagctgtcggtggataacctgacggggcatatcacgcgtgaaaatcaaagctgggcatttcacatccccgatacgcggatctcgatagacggcaaagcctggccacgcggcgagctggcgatggcgtggatcccggcgcaggaagtgggtggcaataacaatcagcgcagcgatgagctacgcatccgtgccagcaatctcgagcttggcgggctaaccggtctgcaaccgatggccgataagctggcgccgagctttggcgaagtgtggcgaaccacccagccgagcggcaaaatcaacctgttggcattggatatcccgctgcaggcaacggaaaagacccgtttccaggccgactggagcgatctggcgtggaagcagtggaagctgctgccgggagccgagcacttttccggcagcctgagcggcagcgtggaaaacggcgaactgcgcgcgcatatgacccaggcaaaaatgccttatgaaacggtctttcgcgcaccgctggagatagcccagggcgatgcgactctaagctgggagaagaacagcaagggctttatgctggatggccgcgatatcgacgtgcaggcgaccggcgttcgcgcgcgcggcggcttccgctatctgcagccagcaggcgatgagccgtggttaggcatcctggcgggtatcagtaccaacgatggcggccaggcgtggcgctatttcccggaaaatctgatgggcaaagcgctggtggattacctgagcggcgcaattaagggcggccaggcaagcaatgccaccctggtttacggcggcaacccacatcagttcccctatgagcataacgaaggccaattccaggtctcggtaccgctgaagaacgcgactttcgccttccagccggactggccggcgctgaccggactggatatcaaccttaacttcgtcaataacggcctgtggatgaaggcggataaagcgatgctgggcaacgttactgccagcaaccttgacgcggtgatccccgactattcccatgaaaaactgtttatcgatgccgatgttaacggccctggtaaagaggtcggcccttatttcaaacagaccccgctgaaggatacgctcggctcagcgctggatgaactgcagcttgatggtaatgtgagcgctcgcttacatcttgctatcccgcttgatggcgagatgaccatcgccaaaggcgatgtgcggctgaaaaataacgatctgtttatcaagccgattgacgcgacgctgaagaatctcaatggtcagttcagcttcgaaaacggagatttaaaaagcgggccgctaagcgcgacctggtttaatcaaccgttgaaccttaatttcaccaccactgaaggggcgaaagccttcctcgttgacgtcggcatgaacgctaactggcagccgacgcgtaccggcctgctgccgaaagcggtcaatgatgaactcagcggcagcgtcccctgggacggcaaagtggccattgagttaccgtatcgcggtagcgcgagctacaaagtcgatatcaacggcgatctgaaaaatgtgagtagtcacttacctgcgccggtgaataaatcggcgggtgagccgttgccggtgaaaatcaacgtgaccggcggcttaagcagcttcgatttgaccggcaacatcggcagcaagaaccacgtcaatagccgctggttactgaataacaagctgacgctcgatcgggcgattctgacctccgacagcaaagcgattccgtcgctgcctgaagcatcaggcgtcgagctcaacatgccggcgatggatggcgcgcaatggctggcgttgttccagcaaggcgccgtcaacgaagtgagcagtaatatggccttcccggagcgcgtgacgcttcgtacaccgtcgctggccttcgccgggcagaactggaataacgtcagtctggtctctcagcctgacggtagcggctcgaaggtggaggcgcaggggcgtgaaatcaatgccacgttgacgatgcataagaatgccccctggctggcggctattcgctacctctattacaacccttccagcgataacagcggtacggcgaaaaaagagagcggcccgctggctgatacccgtctggatttccgcggctggccggatttacaactgcgctgtaaagagtgctggctgtgggggcaaaaatatggacgaatcgacggtgacttcgatatcaagggcgatacgctcaccctcagtaatggcctggtggataccggctttggccgactcactaccgatggcgtctgggtaaatgcgccgggcggcgtacgtacctcgctgaaaggcaagcttcacggcaataaaacggacgacttcgtcaacttcttcggtgtctcgacgccggtgaaagggtcgtcgtttgatgtcgattacgatctgcactggcgcgcgccgccatggcagcctgatgtcgcttcgctgaacgggatcctcaaaagccgcctcggcaaaggcgagtttactgacctgagcaccggtcatgccggtcagttgttaaggctattgagcgttgacgcgctgctgcgtaagctacgcttcgatttcagcgacaccttccaggaagggttctggtttgattcgattcgcagtacggcgtggattaaagacggcgtgctgaatacggatgatacgctggtggatgggctcgaagccgacatcgcgatgaaaggttcggtcgatctggtgcgtcgtcgtttagatttacaagcggtggtggcgccggaaatatcggccaccgtcggcgtagcggcggcattcgccgtcaacccgatcgtcggcgcggcggtgtttgccgccagcaaggtgcttgggccgctgtggaacaaagtgtcgattctgcgctatcgcattacgggtccaatcgatcagccggaaatcaatgaagtgctgcgccaggcgcgcagcaacaaaaagcaatgatttgacgagtacggggaattatcgcactctcaatagagggcattttctccccgtcatctttttcgccgcatggcattcccctgtgtcaggcggcaacaaacgagtagcgtaacgatgagtttgaacctggtaagtgaacaattactgtcggcaaatggcctgaaccatcaggacctgtttgccattcttggccaactggctgagcgccgtctcgattacggcgatctttattttcagtcgagctatcacgaatcctgggttctggaagacagcatcattaaagatgggtcgtacaatattgaccagggcgtaggcgtccgggcggtaagcggcgagaaaaccggttttgcctatgcggaccaaatcagcaaactggcgcttgaacagagtgcccaggcggcgcgtactatcgtccgcgaccatggcgacggcaaagtgcagacgctcggcgcggtggaatacagctctctctataccagcgtcgatccgctgcagagcatgagccgcgaagagaaactggatatcctgcgccgcgttgataaggtggcgcgtgctgccgataagcgcgtgcaggaagtttccgccagcctgagcggcgtctacgagcttatcctggtggcggcaacggacgggacgctggccgctgatgtccgtcctctggttcgcctctccgtgagcgtgctggtggaggaagacggcaaacgcgagcgcggcgccagcggtggcggcgggcgatttggctatgattatttccttgcgccgctggatggtgacgtacgggcggatgtctgggcgcgtgaagcggtacgtatggcattagtcaatctgtccgcggttgccgcgccagccggaatgctgccggtggttcttggcgcgggctggcctggcgtgctgctgcatgaagccgttggccacggtctggaaggtgactttaaccgtcgcggcacctcggtcttcagcggtcacatgggcgaattagtcgcctctgaactgtgcaccgtcgtggatgacggcaccatggccgatcgccgtggctcggtcgcgattgatgacgaaggtacgccgggtcaatacaatgtgcttatcgaaaacggtgtcctgaaaggttatatgcaggataagctcaacgcgcgtttaatgggcgttgcgccgaccggtaatggtcgccgtgaatcctatgcgcatctgccgatgccgcggatgaccaacacctatatgctggccggtaagtcgacgccgcaggagattatcgaatcggtcgattacggtatctatgcgccgaactttggcggtggccaggtggatatcacctccggtaaatttgtcttctcgacctcggaagcttatctgattgaaaaaggcaaagtgaccaaggcagtcaaaggcgcgacgctaatcggttccggtatcgaagcgatgcagcagatttctatggttggtaacgatctgaagctggatagcggcgttggcgtgtgcggtaaagaagggcagagcgtgccggtcggcgtcggccagccgacgctgaaagtcgacaaccttaccgttggcggcaccgcctgataacggctggtcccggcggcgcgaagccgctgccgggatgtcaattaacgggtcatcccgcgcccgtgcattccctgatagatcttcgccacctcgacaaaataatccgtcagatagttaatacatacctgcaccttcagcggcagtttgtctttttcggtatacagcgcatagaccggccgcggatccgattgatagctcggcagcaggatctccagttcaccgcgattgatctcgtcgatcgcccacatcagcggaacgtaggccacgccaacgccggcagtcagccagcggatcagcgtcatcggatcgttagtgacgaaacgcccttgtgggatcaggcgtgttgagatcccctccggggcgataatttcgaactcattatctggccgtacgctatattccagccacgagtggctggcgagatccgccggtttttccgggcatcccgcgtgctgaagatagcttttcgccgcgcagagcaccatcggcatcgagcccagccgccgcgagaagaggctggaatcctgcaatgcgccgacgcgtattaccacgtcgaggccatcggcaatcaggtctggcgcagggatgccggtcaccagattaatcgataaacccggatattctttgagcatgtcggcggttatgcgcgccagcacattctgtgccatagttgaagagctaccgatgcgcagcgtgccgatgggagtattgttgaaggcatacagctgttcatggacgtcctgcgcttcaaagagcattcttcggcagccctggtaataaattttacccgcttctgttaagcccaggctgcgggtgctgcggttgagcagctttacctgtagctcgtcttccagtttagcaacggtctggctgatagatgaaacgctcatctggagctggcgtgcggcggcggtgaaagagcccagctcaaccactttggcgaacaccgacatgcgttttagtcgttccattattcactctggcttaaaagtgatttagatcacatattatagataaggctgcaattgttacgttaatatatagttagctacataataaacgcatcacgctaccacctgtacgcttcttatcaaggtcatcatgagtctgtttcctgtcatagtgattttcggcctatcgtttccgccgatcttctttgagctgctattgtcgctagccatcttctggctggtgcaccgtttgctggttccgaccggtatttatgattttgtctggcaccctgcactgtttaatactgcgctgtattgctgtctgttttatctgatatcgcgcttgttcgtttgaggtcgatgtgaaaacactaacaagaaatatcctgcgtactgccatcactgtgatactggttattctggcgtttatcgctatttttcgcgcatgggtgtactacaccgcgtcgccgtggacgcgcgatgcgcgctttagcgccgatatcgtcgccatcgccccggatgtgtctgggctcatttcacaggtgaatgtcaaggataaccaactggttaagaaagaccaggtattgttcgttattgaccaacctcgttaccaaaaagcgctggcggaggcgcaagccgatgtctcctattaccagacgctggctcaggaaaaacgcgttgaagccgggcgccgtaacaagctcggcgtgcaggcgatgtcgcgcgaagagattgaccaggccaacaacgtgctgcaaaccgtagagcatcagctggcgaaagcggtggccagccgcgatttagccaaactggatctcgaacgcacagtgattcgcgcgccagccgacggctgggtgaccaacctgaacgtctacgccggcgaattcatcacccgcggttcgaccgcggtcgctttggtgaaacaaaataccttctacgtgatggcatacctggaagagactaagctggaaggcgtgcgtccgggttatcgcgccgaaatcactccgctcggtagtagtaaggtgataaaaggtaccgttgacagcgttgccgcgggcgtgactaacgccagcagcagcagcgatacaaaagggatggcctctgttgactccaaccttgagtgggtgcgtctggcgcagcgcgtgccggtacgtattcgtcttgaccagcagcagggcaacctctggccgtcgggcaccaccgcaaccgttgtcattaccggtaaagaagatcgcgacgccagtcaggccaacttcttccagaaagtcgccatgcgcttacgtgagtttggttaatcgccatggggacctataccattgctccccggcatctccgctttgccattaagcttgcatgcgcggtggtgctggcgctgtttgtcggctttcattttcagcttgagacgccgcgttgggccgtactgaccgcagctatcgtgaccgccggcccggcatttgccgccggcggtgaaccctattccggggcgattcgttatcgtggaatgttgcgtattgccgggacgtttatcggctgtattgccgcgctggcgatcattatcctcatgatccgcgcgccgctgttgatgatgctggtctgctgtctctgggccggtttctgcacctggatctcctcgctggtgaaggtggaaaactcctacgcctgggggctggcgggttatacggcgctgattatcatcatcaccattcataccgacccgatgctggcgccgcagtttgccgtcgagcgctgtagcgaaatcgtcatcgggatcgtcagcgccatcgttgctgatctgctattttccccgcgctccatcaaaaaagagatcgacctcgaactggataacctgttactggatcagtatcgcctgatgcagctttgtgtcgcccatggcgatagcgaggtggtggacaaagcctggggagcgctggtgcgccgtactgccgcgctggaaggaatgcgcggcaatctgatcatggaatcttcgcgctggtcgaaggtcaaccagcggctaaaggcgatcaacacgctatcgctgacgctgattactcaggcctgcgaaacctatctgatccagaactcacgcccggagatggtgactgacgactaccgcgagctgttcgcggagccagtggaaacggtacaggatgtgcatcaacagcttaagcgtatgcgccgcttcctgacctggaaaggtgaacacaatacgccggtcactatttatagctgggtcggcgcggcgacgcgttacctgctgctcaagcgcggcgtggttggcaacaccaaaatcagccgtattgaagatgaagttctacgcggcgagacggtggtgaaggttgagtccgccgaacgtcaccacgcgatggttaacttctggcgaacctccatttcctgtattctcggcaccctgttctggctatggaccggctggacatccggtagcggggcgatggtcatgattgccgtggtgaccgcgctggcgatgcgtctgcctaacccgcggatggtggccttagacttcctctatggcacccttgccgctttaccgctcggcgcgctgttcttccttgtcgtcatgcctgcgacgcaacagagcatgctgctattgtgtatcagccttgccgcgatggcgttctttatcggcattgaggtacaaaagcggcggttgggatcgctgggggctttagcgagcaccatcaacattttggtgctggataacccgatgcagttccagtttagccagttcctcgatagcgccctggggcagattgtcggctgtttcctcgcgctgatggtgattctgttagtgcgtgataactcgcaggcacgcaccggacgggtgttattgaaccagttcgtctcggcggcggtctcttcgctcactactaacagcgcaaggcgaaaagagaaccatttgccggcgctgtatcaacagctgtttttactgctgaataagtttcccggcgatatcgcccgctttcggttagcgttgacgctgattatcgcgcaccagcgtctacgcgatgccccggtaccggtaaacgaggatctgtcggccttccaccgccagctgcggcgaaccgccgatcacgttatctctgccggcagcgacgataagcgccgccgttactttacccgtctgctggaagagcttgatgtttatcaggaaaaactccttcactggcaggcgtcgccccaggttactgagccggtgcgacggttggtggatatgctgaaaaaatatcaacacgtgctcaccaatagctaacctgcgaaccgacgccccggcgtcggtttttttatcgctatacttatttggtgtagagggacagagcggaaggggcggcgggcaatgactatttatacctttgattttgatgaaatagctgagcaacaggatttctatcgtgagttttcccgcgccttcgcgctaccggataagcaggtggataaccttgacgcgctgtggagcgcggtgacgggagggcgcttaccgttcccgctggagattgaatttgtccatctggatgaaaaacagcgtcgtcgctttggcgcgttaattttgctgttcgatgaagcggaagaggagctggaaggacaactacgtttcaatgcccgttgggcataaaaaagcccccggcaggcgggggcaagtcgtcggataagacgacgagggtttatttgtacaactcagcagtcgcgtgccagctgtcgccggtacgagcttcaataatgcggtagctgctggcgccttctttctcggctttagccgcgagttcctggcgcatatccattggcgcgctacctacttgcgatacagagatagtgcccattggttgcaggttttgtgcttgatcggcattcacttgctgtacggctgcgcttgcgccgaaagagagaacagatgccagacccagggatgcgatgataattgcgcttttcataatcttgactccaaccttatgtgcagcggcgggagatttcgtatgaacccaggccgctgaagagatactgtttcagttaatgaccgacaatcgttaaagcttatttataaagttcagcagtggcgtgccaatggtcgccggtgcgagcttcaataatgcgataagaagaagcaccttcttcttgtgcttttttgttcagcatttcatgcatatccatcggggaagaacctaccgcgccgatagatacggtgcccagtgactggcggctttccgcttgagtgctgttgattgaatcagcggcgaaagcgccaaaggacagtacggatagcatgctgagtgcggctacagtggttttgattttcatgatgttcacctcgtcgaattttattattagggggctttgtttcgtgaccctcatcacaaaatcaagtatacactaatcaccaaaaatattaataccatgctaattgttttcagtgtaaataatttccaagaaatgtcgtttttataacgtataagaattagaaatgtcattcatgtggtgaatgtcatagttatttatatttaaatcaaatagatattgcgctttgatcttttgtgcgctttagccgttatcattcggtaaaggaatgtatagaggtggaaaaccacactaaatgttaaaaaaatgctgctttatttgaaggtttggggggatagcattttgcggggaagaaccctctggcaggaaccagagggggagcgcttagagttcctgttcgaacaggaccagaatcgcgtcgtagagatctttaacggaaaaaccgcgggcaggggtggtaaagatagtgtcatcacccgcgatactacccagaataccttcggctttgcctaaggaatccagcaggcgtgcgattagctgcgccgcgccggggctggtgtgaatcaccaccaccgcatcgttataatcgatgtccagcaccagatttttcaacgggctggaggtcgtcggcacgccgagttcggcaggcaaacagtagaccatttccattttggcgttacgcgtgcgaacggcgccaaactttgtcagcatgcgggaaactttcgattggttgatgttctcgaaaccttcttcctgcagcgcctgaacgatttcgccttgcgagctgaatttttcttctttaagcagcgatttaaacgctttaaccagttcttcttgttttgccgaactacgcataagtcacccagattatggtggtaaaaacaacatcattatgcatacaagtgcatttttatgcaaataatccgcaaaggaatagcgtaaataatgttatgaaaggcgcatattttagcaaataaccctgatgaggaacatgcctgcatcacagcgggtaaattgctgtaaaagtgaaataaatgttatgaaattgatattgttttgccgagtgagctgggtgtattgtaaccaatagtcgatccggtactacggctttgctggatggccagtctcaggaagaaaaatgcgaatttgctgcatcattgcgcgtaccccgcattcttcagccataattattgtaattgttcatcttgtgaattaaggtccaggcgacggaataacgaaagactatattaaccataataaggagtttaggatgaaagttgcagtcctcggcgccgctggtggaatcggccaggcgcttgccctactacttaagacccaactgccttcaggttcagagctctcgttgtacgacatcgctccggttacgccgggcgtggcggtagatctaagtcatattcccacagatgtaaaaatcaaaggtttctccggtgaagatgccaccccggcgctggaaggcgctgatgtggtgctgatttccgccggcgtcgcgcgtaagcccggcatggatcgttccgacttatttaatgttaatgccggtatcgttaaaaacctggtgcagcagatcgcaaaaacctgtccgcaggcctgcatcggtattatcaccaacccggtaaataccaccgtcgctatcgccgccgaagtgctgaaaaaagccggtgtgtacgataaaaacaaactgtttggcgttaccaccctcgatatcattcgttctaatacttttgtcgccgaacttaaaggtaagtcggcaacagaggttgaagttccggtcattggcggccactctggcgtcactatcctgcctttactgtcgcagatccctggcgtcagctttagtgagcaggaagtcgcggatctcaccaaacgtattcaaaacgccgggacggaagtcgtggaagcgaaagcgggcggcggatcggcaacgctgtcgatgggccaggccgctgcgcgtttcgggctctcactggtgcgtgcaatgcagggtgaaaaaggcgtggttgaatgtgcctatgtcgaaggtgacggccagtatgcccgtttcttctcgcagccgctgctgttgggcaaaaatggcgtggaagagcgccagtccatcggtaaacttagcgcttttgaacagcaggcgctggaaggcatgctggatacgctgaagaaagatatcgccctcggcgaagatttcgtgaataagtaatgtctacttagcagaaaagccggaaccgtcgttccggcttttttatcgcctcatatccctgccgaatgcgccgcctggcggctaaatcagtaaacacaagatcaacccgctgattggttccgccggggtatcggcgttgccgatggcggcgcgcgtgtccaataaggtgggtctggaagcggacgggcagaacttcctgctgatgcacgcgatggggcgaacgtggccggggtgatcggctcggcgatcgccgccggggtgatgctcaagtacgtgctggcgatgtaaaccggcatccttcccggatggcgactggcgccttatccgggctaccagtccgctccggtttgtagccccggtaagcgcagcgccaccggggagaggttcccggatagcggcttgcgccttatccgggctaccggtgatcccgtagcccggctgggcgccgcgcgaaccgggaattttccctgaggaggctttgatgaatgaaacggtagcattacgtcctggcagcaggtcatcggcaaaagaggaagtcattgatgacactctggcgtcgctggaggagcttgaacaactgcacccggctttgaatctgctggcgcatccgccagtcgtccgtggcagccatgatttctttgtctgttgttatgacgccggtgtatagcatgcgcagaccgggaaggctgaaacggtagcggcgttgctgggttcgctgctgcatttgctggcctggaagagtgaatcgccatgggcgcggcagcaggcgcaacggctgctgtggcagggcggggttctcggcgagagaggggagttcgcgttactgacgctggatgatgaactgcgggagcggcaggtccgctggccatcgttgcggtcgttactggcggtgaccgggtttctggccagattcccggccggaccgctgtttgttgattaatagcgctccgataacggagcgctaatcgttaatttgtcgccggatattcctgtaccgccacgtgcagggtgattttcttatcatcacgcatgatgaccaccgggatttctgaacccgggcgaatttctgcgacctggtccatggtttccagcgccgaaaccgctggtttatcgttcaccgagatgatcacatcattggcgcggatcccggcctgcgccgctgggccgtcaggtgcgacgtcattaacgacgatcccctggatctgatccatgccgccgctctgcgcatgcatcggcgcgatctcgcggccgctgatcccgatgtaaccgcggatcacccggccgtcgcggatcagtttatccatgattttggtcgccagctggaacgggatggcaaagccgatcccttccggcgtttcgccgtcattgctcttatcaaacgacagggtgttaatacccatcagttcacccagcgagttgaccagcgcgccgccggagttgccgtggttgatagaggcgtcggtttgcaggaaattctgtcgcccggtggggttcaggccgatacgaccggtcgcgctgatgataccctgggtgatggtttgcccaaggttatacgggttgcctatcgccagtaccacatcgccgatatgtggaacgcgtttcgggttaatcgggataaccggcaggccgccgctggcgtttattttgagcaccgccaggtcagtcagggtatcggaaccgaccaacagggcttcaaatacccgtccatcctgcaaggcgatgattatctgatcggcatcgttgatgacgtgcttgttggtgaggatatatccgcgttggtccatgataacgccggagccgagcgtcagctggttatggctggtgctgttcagcgcgcggttatagacgttgaccaccgccggcgcggcgcgtcttaccgcagcattatagctggcgggcgattcgtcagcggtatcgctcggcgtcgccgacgagagctgccactggcgcagcgaaggcatcgccgccagcaggatgccgccaacgattaaaccgataaggactgaacgtaaaagctttcctggcatgatgcgaatatcgttaattaatgggcaggcgcagcatagcatgacttatccggacatcgcacgacgcgcgatgtccggatacagccgtcagcgtagcagcagataaatgctttcgttaccgcgcagcacattcagcgcgatgacggccggtttggtttccagcactttacgtagctcggcgatggaacgcacacgctggcggttgaggccgataatgagatcgtctttatgcaggccaacctgagccgccgcgctgcctttatcgacgttatcgatgctcacgcccttagtgccgtcttttaactggccatcgcttagcgccgctccctgcagggccgggataatcagctcggcgctggcggtggaggaggtgctcttatccaacgtgacctcgacgtccaacggtttgccgtcgcgcagtagccccagttttacttttgtgccaggggcggtagtggcgatacgcgagcgcagctcggcgaagctgcttagcggcttgccgttcatgctgacgataacatcaccggatttaatcccagcttttgcggagcctgaattggccaggacttcgcttacaaaggcgccacgctgagcgttgatattcatcgctttggcgatatccgcgctcatttccatgcctttaatgcccagcaggccgcgtttgatttcgccgtattgaataagctgatcggcgagggtcttcgccatgttgctcgggatggcgaagccgataccgatgctgccgccgcccggcgccagaatggcggtattgatgccgataagctcgccgttgagattcagcaacgcgccgccggagttgccgcggttaattgaggcatcggtctgaataaagttttccagcccttcgagattaaggccgctacgacccagcgcggagatgatgccggaagtagcggtttgcccgaggccgaaggggttgccaacggcaacggcgaaatcgccgacgcgcagcttgtcggaatccgcgatggcgatttgcgttaaattgctgggttttaaaacctgcagcagggcgatatcgctctgttcgtcgctgccgaccagtttggcatcgaactcgcggccatcgttcaactgaatgctgattttctgcgcctggcttattacgtggttgttggtcagcacgtagcctttggcggcgtcgataatcacccctgatccgaggccttcaaacggctgcgcctgctcttgcggcgcgttgtcgccaaagtattttttcagctcttccggcatattctgcaccggcgaggcggtgccttctacctgcacgctgaccaccgcaggcaatactttttccagcatcggcgcgaggctcggtagcgcgccctggcctggaacctgggtcggcagtgatgccgccgccggaggcaggaccgacaacgataatccaatgcttaacgctaacgcactcaacagcaaagtctgtttcttcattagatgctggctctcgtaacctgaggtgtatggaaaaaacgtccgaatgatttgatgttattgaattttcgaccggctaacaatgcggtccgtgcttaaattgtagctgggatgcagggggaagacgggcgcggaaggcgcgcccggtaaatatttttacgcagacagcgggatcagtcgcgtttcgcaccaccgcgcagtaggccggatgcgccttcagaataatcgcgcggcatctgtaccggcgcctgatcgttgctggcttcggactccgccaggcgattgcggaacggattggcgtccgccatcgcgtccggcagcaggctgctggagctttttgccatgtgctgatacagctgacggtagtcatccgccatgttgtccagcagttctgcgctgcgcgcaaaatggctgaccagctcttcgcgatactcttcaagctctgctttattcttttccagttcgaactgcagcgcttgttgctgacgcaatttgcggttaccaaaacgcatggcgacggcaccgatgatgataccgacgactaatccaattagcgcgtattcccaggtcatgaacatctcccgttgttttgtggttccgtagggtggctgttaggctctccgcctgcgcccgatagtgccactataaccgctaattccacagaagtggaatcctggcgtatcatcgcgtactgtagaaccgcctttttttcgtcaatcgtgggccacggcgccacggttttcaaggaataacaataagatcatgcaaagcctgtccccaacatcgcgttaccttttagctctcaaagagggcagccatcaaccagacgacgtgcaacaagaagcggtcagtcgcctcgataccatctatcgtgaactgcaggaaaaaccagccgccgcagcgcctgcgggcggcgggctgcgggcgaaattcagcaagctgcttggcaaacgcgaaccggcggcggaagcgaccgccgtacgcggcctgtatatgtggggcggcgttgggcgcggcaaaacctggctgatggatatgttttatcaaagcctgccgggcgagcgtaaacagcgcctgcatttccatcgctttatgctgcgcgtacacgaagagttaactaccttgcaggggcatagcgacccgctggagatcgttgccgatcgctttaaagcgcaaaccgatgtgttgtgctttgacgagttttttgtctccgacatcaccgatgccatgctgctcggcggcttaatgaaagcgctgttctcgcgtgggattacgctggttgctacctcaaacatcccgccggacgagctctaccgcaatggtctgcagcgcgcgcgtttcttgccggcgatagacgccatcaaacagcattgcgacattatgaacgtcgatgcggggattgattaccgcctgcgcacattaacccaggcgcatctgtggctgtcgccgctcaatggcgagaccagccagcaaatggataaactctggctggcgctggcgggagccaaacgcgagcagatgccgacgctggaaattaaccaccggccgctgccgacgttaggcgtggaaaaccagactttggcggcgtcgttcgacacgctgtgcgtggatgcgcgcagccagcatgattacatcgcgctgtcacgcctgttccataccgtgatgttgttcgatgtgccggtgatgacgacgcatcttgagagcgaagcgcggcgctttatcgcgctggtggatgaattctacgaacgtcacgtaaaactggtggttagcgcggcggtgccgctgtatgagatctatcagggcgaacgcttgaagtttgagttccagcgctgtttatcgcgcctgcaggaaatgcaaagcgaagagtatctgaaacaaccgcacatgccctgaatccagccttcttctcacattgagaaaaacctgctgcaaatcacataaaggggtcgatctttggcccctacttctctataatcttgcgaccccacgttacgagaaggttttttttcccgaaatcttctatgtgctggcataggctattcgaaggggtaggtttgccggactttgtcgtgtgaacctcaactgactaaacgtttgggtgttcaccaacgtgtaacttatttatttgggtaagcttttaatgaaaacttttacagctaaaccagaaaccgtaaaacgcgactggtatgttgttgacgcgaccggtaaaactctgggccgtctggctactgaactggctcgtcgcctgcgcggtaagcacaaagcggaatacactccgcacgttgatactggtgattacatcatcgttctgaacgcagaaaaagttgctgtaaccggcaacaagcgcgaagacaaaatgtactaccaccacaccggccacatcggtggtatcaaagaagcgacctttgaagagatgattgcccgccgtcctgagcgtgtgattgaaatcgcggttaaaggcatgctgccaaaaggcccgctgggtcgtgctatgtaccgtaaactgaaagtttacgctggtaacgagcacaaccacgcggcacagcaaccgcaagttcttgacatctaatcgggattataggcaatggctgaaaatcaatactacggcactggtcgccgcaaaagttccgcagctcgcgttttcatcaaaccgggcaacggcaaaatcgtaatcaaccagcgttcgctggaacagtacttcggtcgtgaaactgcccgcatggtagttcgtcagccgctggaactggtcgacatggttgagaaactggatctgtacatcactgttaaaggtggtggtatctctggtcaggctggtgcgatccgtcacggtatcacccgcgctctgatggagtacgacgagtccctgcgttctgaactgcgtaaagctggcttcgttactcgtgacgctcgtcaggttgaacgtaagaaagtcggtctgcgtaaagcacgtcgtcgtccgcagttctccaaacgttaattgttttctgctcacgcagaacaatttgcgaaaaaacccgcttcggcgggtttttttatggataaaacggctgttatccacaaagaaatggtctgttcttaccactttttcagcatttccagaataccctcaccacaacgtccgcaaaatctggtaaactatcatccaattttctgcccaaatgctggtggttgttcattttttagttaatcaatgaacatatcgtcgccgtgcgaatggggtttatacatctggctggccatgcgtggtcggcagcagtaaaaattctgaatatacctggaggttttcatggctgtcgctgccaacaaacgttcggtaatgacgctgttttctggtcctactgacatctatagccatcaggtccgcatcgtgctggccgaaaaaggtgtcagttttgagatagagcacgtggagaaggataacccgcctcaggatctgattgacctcaacccgaatcaaagcgtcccgacgctggtggatcgtgagctcactctgtgggaatcccgcatcattatggaatacctggatgagcgtttcccgcatccgccgctaatgccggtttacccggtggcgcgtggtgaaagccgtctgtacatgcaacgtatcgagaaagactggtattcgctgatgaataccatccagaccggtaccgcggcccaggctgatgccgctcgtaagcagctgcgtgaagaactgcaggcgattgcgccggtctttactcagaagccttacttcctgagcgacgaattcagcctggtcgattgctacctggctccgctgctgtggcgtttgccggttctcggcgtagaactggtgggtgctggcgcgaaagagcttaagggctatatgactcgcgtcttcgaacgtgattctttcctcgcttctttaactgaagccgagcgtgaaatgcgcctcggccggggctaaataatggatgtctcacagctgacgccgcgtcgcccgtacctgctgcgggcgttctatgagtggctgctggataaccagctgactccgcacctggtcgtcgatgtgacgctgccaggcgttctcgtgccgatggagtacgctcgcgacggccaaatcgttctgaatattgcgccacgtgcggtgggcaatctggaactggcgaatgacgaagtgcgctttaatgctcgcttcggcggcgtaccgcgcaacgtttccgtgccgctggctgcggtactcgctatctatgcccgtgagaacggcgcaggaacgatgtttgaacctgaagcggcctatgacgaagatgtcagcagcctcaacgatgatgacgtcgtgtctgagagcgaaaacgaaacggtgatgtcggtgattgatggcgataagccggataatcacgatgacgatcctgacgacacgccgccgccgccgcgcggtggtcgtccggcgctgcgcgttgtgaagtaatgcctgacaggccctccggggcctgttttttttgctcctgcttaaccacgatcaagcataaaaaagcccgatagcgttaaccatcgggcttttctgcgttgagactcagggtctaatcagacttcaagatagttgaggatcccgtccgccgctttacggccttcggcaatcgccgttaccaccaggtctgagccgcgaacgatatcgccgccggcaaagattttcgggttgctggtctggaacgcgttgtcgctgccttccggggcgatgatgcggccctgagaatccagctcgacgctatgtttcgccagccattccatgctgtgtggacggaaaccaaacgccatcaccaccgcgtctgccggcaccacgtgctcggaaccggcgacgatttccgcgcgacggcggcctttcgcatccggctggcccatttcggtgcgcgccattttcacgccgcacactttgccgttggcattcacttccacgcccagcggctggacgttgaactggaattcgacaccctcttcacgcgcgtttttcacttcgcgtttggaacccggcatgttttcttcgtcacgacgataggcgcagataacgtgcgccgccccctgacgaaccgaggtccgcacgcagtccatcgcggtgtcgccgccgccgagaaccaccacgcgtttgccttccatactgacgaacggttcgtgcgccgtttcgccaaagcccatgatctgtttggtgttggcgataaggaacggcagtgcgtcatacacgccgttggcatcttcgttttccagtccgccgcgcatggactggtaggtgcccacgcccagaaatacggcatcgtactctttcagcagatcgtcgagctggacgtcacggcccacttcggtattgagccggaactcaatccccatgccggtgaagatctcacggcggcgggtcatcacctctttttccagcttaaacgccgggatgccgaaggtcagcagaccgccgatttccggatgacgatcgaaaacgatcgcctttacgccgttacgggtcagcacatccgcgcaggccaggcctgccggaccggcgccgataatggcgacggttttaccggtttgcttcacgccggacaagtccggacgccagcccatctcaaacgccttatcgttgatatagcgttcaatgttgccgatggtcaccgcgccgaactcatcgttcagggtacaggaaccttcgcacaggcggtcctgcgggcagacacgtccgcagacttccggcagggtgttggtctgatgcgacagttccgccgcttcaaaaatgcgcccctcgttggccagtttcagccagttagggatgtagttgtgcaccggacatttccattcgcagtacgggttgccgcaggagaggcagcgatctgcctgcgccttggcctggccttctgaaaacggctcgtaaatttctacaaattcaattttacggatcttcagcggtttctttggcggatcaacgcgctgcaggtcgataaattggtatacgttctgactcatcttaaccccctactgcgcctgcacccgcagctcagctgcggaacgactacggtgacccaacagtgctttaacatcgctggacttcggtttaaccagcgcaaacttcgccgcgaaggccggccagttggcgaggatctcttcgccgcgctgcgaaccggtaagctgaacgtgttcggtaattaagccacgcaggtgctcctcatggatagccagcgtgtccacgtccagaacttccaccagttcagggttaacgcgtttacggaagtcgccatcttcatccaggacgtaagcaaagccgccggtcatacctgcgccgaagttcacgccggttttccccaggatacagacgatgccgccggtcatgtattcacagccgttgtcgccgatgccttccaccacggtgatggcgccggagttacgtaccgcaaagcgttcgcccgcgcgtcctgccgcgtacagacgaccgccggtcgcgccatacagacaggtgttgccaatgatacttgcttcatggctacggaaggcggagccgaccggaggacgaatcgacagcagaccgcccgccatgcctttccccacgtagtcgttggcgtcgccggtcaggtgcagctcaacgccgccggcgttccagacgccgaagctctggcccgcggtaccgctaaagtgggcggtaatcgggtcggcggccagcccctggtcgccgtgagtctgggcgatataaccggacaacgacgcgccaacggaacggtcggtgttgcgaatatcgaaccagaacgttttgctctgtttgttatccacatacggcttcgcctgctgcagcagctgcgcgttgagcacgccgttatcgaacggcgggttgctctcggtgcagtacagcgctttgcccggcagcggctcagcggtttccagcagtttgccgagctccagtttctgctgtttcgccgtaaagccttccagttctttcagcaggtcggtgcggccgatcaggtccaccagacgcttcacgcccagctgcgccatcagctcgcgggtttcgcgggcgatgaattcaaagtagttggtcactttgaacggcaggccgtggtagtggttcttacgcagtttgtcgtcctgggtcgctacgccggtggcgcagttgttcaggtgacagatacgcaggtatttacagcccagcgcgaccatcgggccggtgccgaagccgaagctttccgcgccaaggatcgccgctttgatgatatcgaggccggttttcaggccgccatctacctgcaggcgaattttatgacgcaggccgttggcgaccagcgcctgctgggtttccaccaggccaagttcccacggacagccggcatatttcaccgatgaaagcgggctcgccccggtaccgccatcgtagccggcgatagtgattaagtctgcgtaggctttcgccacgccggtggcgatggtgccgacacccggttcggaaaccagtttgacggaaatcatcgccttcggattgacctgcttgaggtcgaaaattagctgcgccagatcctcgatagagtaaatatcgtggtgcggcggcggggagatcagcgtcacgccaggtaccgaataacgcagtttggcgatataaggcgtcactttgtcacccggcaactgtccgccttcaccgggtttcgcgccctgggcgactttaatctggattacgtcggcattcaccaggtaggctggggtaacgccgaaccgacctgaagccacctgcttaatacgcgagactttgttggtgccgtagcgcgcagggtcttcgccgccttcaccggagttggagaagccgccgatgctgttcatcgcttccgccagcgattcatgcgcttccgggctcagcgcgccgatcgacatggccgcggtatcgaagcgtttaaacagctctttcgctgattccacttcattgatgcttatggcttcatcgcctgggttgagcgccagcagatcgcgcagcgtggctgccggacgttcgttaaccagcttcgcgtattcctgataatcacggtattcgccgctctgaaccgcctgctgcagggtgcgaacgacgtccgggttgtaggcgtgatattcgccgccgtggacatatttcagcaaaccgccctgagccagcggtttacgcgccagccatgcgcgtttcgacagattcagcaggtcctgctggaagtcatcaaaaccggcgccgccgatgcggctcactacgccctggaagcagaggtcggccacgtcgcgatgcagaccgaccgcttcgaacagcttcgagcagcggtaggaggcgatggtcgagatccccatcttcgacatgattttgtacaggcctttgttgatgccgttacggtagttcagcatcaccgtacggtattctttatcgatagctttgctatccaccagcttcgccagggtttcataggcaagatacggatagatagccgtcgcgccaaagcccagcagcaccgcaaagtggtgcggatcgcgggcgctggcggtttcgacgatgatgttagcgtcgcagcgcaggctcttatcgacgaggcgcgtctggatggcgccaacggccatcggcgccggtaccggcagacggtctttcgcgatgttgcggtcggacagcaccagcagtacggtgccgttacgtaccatctgttccgctttatcgcacagcgcttttaccgtctcggccagcgtggtttcgttggcatcaaaggtaatatccagggtgtcggcgcgataatgctcctcttccatggtggtcagctgtttaaagtcggagtacagcaggatcggcgatttgaagctcaggcggtgcgcctggccttccgcttcgcagaagacattcatttcacggccgatactggtagccagcgacatcacgtgcgcttcacgcagcggatcgatcggcgggtttgtcacctgggcgaactgctggcggaaataatcataaatgatacgcggctggctggagagcacggcgaatggggtatcatcgcccatcgaaccgaccgcttcctggccgttttccccaaggacgcgcaggacggagtccagctcttcagcgctgtagttaaactgtttctggtagctggcgagcgtgtcatcatccaactgacggctgccgacttcttcttccggcaggtcttcgaacggcaccagacggcggacgtttttctccatccactctttgtacggatggcggcttttcagatcgttatcggtttccgccgagtgcagaatgcgcccgctgcgggtatcgatgaccatcagctcgccaggcccaacgcggcctttttccatcacttcatccggctgatagtcccagataccgacttcagacgcgcaggtgatgagtttgtctttggtgatgacgtagcgcgccggacgcagaccgttacggtcgaggttacaggcggcgtagcgaccgtcggacatgacgatgcccgccgggccgtcccacggctccatatgcatggagttaaaatcgaagaacgcgcgcaattccggatccatgtccgggttattctgccaggctggcggtaccagcaggcgcatcgcgcggacgatatccatcccgcctgccagcagcagttccagcatattatccatcgagcttgaatcagagccggtttcgttgacgaacggcgcggcgtcatgcagatcggggatcagcggggtctggaatttataggtacgggcgcgggcccactggcggttaccggtgatggtattgatttcaccattgtgcgccagatagcggaaaggctgcgccagcggccagcgcggcacggtattggtggagaagcgctggtggaacaggcagatggcggattccagacgcaggtccgcgaggtccaggtagaagcgcggcaaatccgccggcatacatagacctttatagatattaaccaggttcgacaggctacaaacgtagaaatctttgtcttcctgcaggcgcttttcaatgcggcggcgcgcgatgaacagacggcgttccatatcgcgcggacgccagcctgccggcgcgttaacaaaaatttgttcaatacgaggcagcgaggagagggcgatttcaccgagcacgccttcattggttggcacatcgcgccagccaacgatagacaatgtttcgcgttgcagctcttcttcaacgatacggcgcgcagcgcttgccagctcggggtctttattcaggaacagcatcccgacggcgtagtttttggctaagcgccagccgcgctcttccgccacaatccggaagaaacgatcgggtttttgtaacagcaggccgcaaccgtcgccggtttttccatcggcaaggatcgcgccgcggtgctgcattcgggccagtgcgtgtatagcggtgcgcactaccttgtggctaggttcgccttctatgtgggcgatcaggccgaaaccacagttatcccgctcaagggatttgtcgtacaacatatcagtgaacctccccaggctctacgggacgcccccttaatcgattgcgcgcaaggcacagcaagagcatggcgacggggtaagggcatctttgcctacctcgcattcgccctctttaaatccttttcgcatcggtacacaagtttgaggacttgctattaagagggaatctcaattactgcataaatatgatgagcagagcgctcatccagaaagcttccagcggattcccaacttagcgagaatccacacttacgtcaaatggcaatcttatttatacaaaagtgtgctaggaggtatttaattttttgattttaaagagaattgttgtttttttaaaggcatataaactctcagggatgcgtaatctagtgtgatctgtctcactatatccgcagcctaagattacctttctgtgctgaattgtatttttatggcggaatatttgactgctggttatcttaatggcaggaaataaaactgttttttgctgcgacaaagataattgaaactcagcattgaagtataagtaaatgttattaccgcgagtgtgaatgaaaccgcgtttattttgatttaatatgcaatgaggtaagcggccgcgctgacgattgatccaggtcatcgccgtcggaggctaaaaatggcaggcttggcccctttcttgaggccggtctatcagattatgcagttacaaaaattagtcaacatgtttggtggggatcttacgcgccgctacggcgaaaaggttcataaactgacgctgcatggtggatttagctgcccgaaccgggatggcacaattggccgcggcggctgcacattttgtaatgtcgcctccttcgccgacgaggcccagcagtaccgttcgattgccgatcagctggcgcaccaggcgcagttggtcaaccgcgcgaaacgttatctcgcctattttcaggcttataccagcacgtttgccgaagtgcagctgctgcgttcaatgtatcagcaggcggtgagccaggcgaatatcgttgggctgtgcgtcggcacccgccccgactgcgttcccgatgcggtgctggacctgctcagcgaatatcgggagcagggctatgaaatctggctggagctgggattgcagaccgcgcatgataaaacgctgcatcgtatcaatcgcggccatgactttgcctgctaccagcgcaccacccgactggcgcgcgaacgcggattaaaagtctgcgcgcatcttatcgtcggcctgccgggcgaaacccagcagcagtgcctgcaaaccctgcaacgggtggtcgacaccggcgtcgatggcatcaagctacacccgctgcatattgtgaccggcagcatcatggcgaaagcctggcaggcgggtcgcctgaacggtattgcgctggatgactatacggtcaccgccggtgagatgattcgccataccccaccggaggtgatttatcaccgcatctcggccagcgcccgtcgcccaacgctactggcaccgctttggtgcgaaaaccgctggaccggtatggtcgagctggacaaataccttaatgcccatggcgttcaggggtcggcattggggacgccgtggatccagcctgcctgatgttccacttccttaacggctgattaccgccgcattttttgcacaacttacagcgtaatgttcagaattgggtattattgtgcggagttggcgataaggaatccctcatgaagcaaattcgtatgctggcgcagtactatgtcgacctgatgatgaagttaggtctggtgcgcttttcaatgctgttggctctggcgctggtggtgctggctatcgtggtgcagatggccgtcacgatggtgctgcatggacaggtggagagtattgatgtcatccgctctatcttcttcgggctgctgattaccccctgggcggtctattttctgtcggtagtggtcgaacagctggaagagtcgcgtcagcgcctctcgcggctggtggaaaagctggaagagatgcgcgagcgagatcttaagcttaacgtacagctcaaggataatatcgcccagttgaaccaggaaattggcgaacgcgagaaagcggaagcggagcgcgaaaccacgctggaacagctgaaaatagagatgaaagagcgcgaagagacgcaaattcagctagagcaacaatcctctttcctgcgctctttccttgatgcctcaccggatctggttttctatcgtaacgaagataaagagttctccggctgtaaccgggcgatggaattgttgaccggtaaaagcgaaaagcagctgattcacctcaagccgcaggatgtctatagcgaagaagccgcggtgaaagtgctggagaccgatgagaaagtcttccgccataatgtctcgctgacctacgaacaatggctcgattatcccgatgggcgtaaagcctgctttgagatccgcaaggtcccctactatgaccgcgtgggcaagcgccgtggcctgatgggctttggccgcgatattaccgagcgtaagcgctatcaggacgcgttggagcgcgccagccgggacaagaccacctttatctcaaccatcagccacgagctgcgtacgccgctcaatggcatcgttgggctcagccgcatcctgctggatactgaattgaccaatgagcaggaaaaatatctgaaaactatccatgtttcagcggtgacgctggggaatatcttcaacgatattatcgatatggataagatggagcggcgcaaagttcagcttgataatcaggaggtggattttaccagcttccttgccgatctggagaacctctcaggcctgcaggcgcagcagaaaggtttgcgctttgtgatggagccaacccagccgctgcctcataaggtgataaccgatggcacgcgtctgcggcagatcctgtggaacctgatcagcaatgcggtgaagtttacccaacagggcaatgtcaccgtgcgcgtccgctatgacgaaggcgatatgctgcacttcgaagtcgaggactccggaatcggtatcccgcaggcggagcaggacaaaattttcgccatgtattatcaggtgaaagacagccacggcggtaaaccggcaaccggtaccggtattgggctggcggtatcgcgccggctggcgcgcaatatgggtggcgatatcagcgtgaccagccagccggggcagggggcgacgtttaccttgaccgtacacgcgcaggcggtagctgatgaagttgaagatacgctggccgaagacgatatgccgctgccggcgctgaatgtgctgctggtggaagatatcgaactgaacgtgattgtcgcccgttcggtgctggaaaaattgggcaacagcgtggacgtggcgatgactggtaaagccgcgctggagatgttcgaacccggcgaatacgacctggtgctgctggacattcagctaccggacatgaccggcctcgatatctcgcgacagctaaaacaacgctatgccgccgatgagttgccgccgctggtggcgctgaccgccaacgtcctgaaggacaaaaaagagtaccttgatgccggcatggatgatgtactgagcaagccgctgtcggtaccggcgttaaccgcgatcatcaagaaattctgggatgcgccggaagacgatggccatgaggcgcctgcggtggatgtggcgaaatcggcatcggtactggataccgacatgctggaacaatatattgagctggtgggaccgaagctgattaccgacgggctggcggtgttcgagaagatgatgccgggctacatgtccgtgctggaatcgaatctcaccgcgcgcgaccagaaaggtatcgtcgatgaaggccataaaattaagggcgcggcggggtcgataggcttgcgccatatccagcaattagggcagcagatccaaacgccagatttacccgcctgggaagacaacgtcggcgagtgggtagaagagatgaaatccgagtggcaaaacgatgttgcggtactgaaggcctggattgcggcggcggataaaaaatgaccccggataaaccggggtgcgcgaatactgcgccaacaccagggaactggttgttgagccaggattgttcgagtgatttttttacacggcgcaacctgaggatttggcttgctcgctcattaagatagcaaaccataaatattttgttacgtgaatcggtaaaatatgtgaagcatagcgagtaaatcaaaattatttacttgtttcatagagttgcgctaaggggttagcaagatgaagaagattggcgtggtactaagcggctgtggcgtttacgacggcgcagaaatccatgaagcggtcattaccctgttggccattgcgcgtcgcggcgcgcaggcggtttgctttgcgccggataaggcgcaaaccgacgtgatcaaccatctgaccggcgaaacgatggcggaaagccgcaatgtgctgattgaagcggcgcgcctgacgcgcggcgctattcagcctttggccagcgcccgcgcggacgagctggatgcgctgattgtgccaggcggctttggcgcggcgaaaaacctgagtaattttgccgcccagggaagtgaatgcgttgttgatcgcgatctgcaggcattaacgctggcgatgcacgaagcgggtaagccgctgggctttatgtgtatcgcgccggcgctgttgccgaagattttcccgacgccgctgcggataaccatcggtaccgatccggatactgccgaggtgctggaagagatgggcgcggagcacgtgccgtgcccggttgacgacatcgtggtcgatgaagacaacaaggtggtgaccacgcctgcttatatgctggcgcagaatattgccgaggccgccagcggtattgagaaactggtcgatcgcgtactggttctcgctgaatgagtaagcgtgttgcgccgctggcgatgattaagcgcctgctgttacgcctgctgctggtctgtgtggtgttctggggcggcggtatcgccgtattcagcgtcctgccggtgccgttctcagcggtgatgctggagcgccaggttagcgcctggttctccggtgatttccattatgtcgcccattctgattgggttggcatggacgagatttccccctggatggggctggcggtgattgctgctgaagatcagaaattccccgaccactggggttttgacgtgccggcaatcgaaaaagcgctggcgcacaacgaacggaatgaaaatcgtattcgcggcgcgtcgacgctctctcagcagacggcgaaaaacctgtttttatgggatggccgcagctggttgcgcaaggggctggaagtgggcttgaccgtcgggatcgaaacggtctggagcaagaagcgcattcttaccgtgtacttgaatattgccgagtttggcgacggtattttcggcgtagaagcggcggcccagcgctattttcataagccggccagccgtttgacccctgcagaggccgcgctgctggcggcggtattaccgaacccgattcgttttcgcgccgatgcgccatcaggctatgttcatagccgacaggcgtggatcctgcgccagatgcgtcagttaggcggcgaaggttttatgcaggccaataagctgcattaaccgcgatcccgccgggagatgattagtcttcatcaaacccggcgttgaacagcgcaatcaccgccgccagcgcttcgacttcctgcgggccgctggcctcaacctcaatttggcgtcctttggcggaatccagcatcagcagggcgataacgctgttggcttccgcttcggtgccttcgtcgttgcgtagcaacacttccgcatcgaaattctgcatcagctcgaaaagcttcattgccgggcgcgcgtgcatgcccagcttgttggtgatttcaacggtttgcttgacggtcatgatttacgtttttccagcgtccggtgacgagattgcacgttcttaccgcgcgaacggaagtagtcagccagctgttcggcaatatagaccgagcgatgcttaccgccggtacaaccaatggctaccgtcagatagctgcggttattggtttccagcatcggcaaccatagctccagatagctacgcgtctggtaaataaagttatgcacttccgtatggcgatcgaggaaggcggcaaccggtttatcgaggccggtcatggggcgcagcttcggatcccagtgcgggtttggcaggaagcggacgtcaaacacgtaatcggcatcgatagggataccgtgtttgaagccgaatgattcaaagaccatcgtcaattcacgctcgcgtttacctaacaggcgggtacgcagcatctcggccagttcatgcaccgacatttcggaagtatcgacgatcagatccgcacgggagcgcagcggctcaagcagatcgctctcttcgtcgatcgcgctttcaagcgacagattcttgctggagagcggatgtaagcgacgggtatcgctgtagcggcggatcagggtgttgcggtcggcatcaaggaacagcagctgcggggagaaggattccggcagattctgcatcgcttgttcaaagatttccggtgattccggcatattgcgcacgtcaatgctgacggccgcagagatatcgcggtcggccagcgttcgcgccagctcaggcaacagcactaccggcaggttatccacacagtagaagcccatatcttccagcgctcgcagggcgacggatttccccgagccagagcggccgctgacgatcatcagtaccatgtaccgtttctcctcagtacgataaaggttaagacgcgactcacgttaagcgtcatcgctgcttcctgcttcggtgatgatctcatacaactcttcatcgctcaccgcagcgcgcaggcgacggcagatggttttgtccgccagacgtttggcgaccagcgagagcgtatgcagatgggttttggtttgatcggccggcaccagtagcgcaaacagcagatcgaccggctgattgtcgatcgcatcgaaggcgatcggcgtttccaactgcacaaatacgccaacggcgcgcagggtatcctcttcaagcttgccgtgagggatcgcaatgccgttgccgatcccggtactgcccattttttcacgggtcaggatcgcttcaaagaccacctgaggcggtaaacctagctgcttcgccgccagttcgctgataatttccagcgcgcgtttcttgctctggcagtgaacctggctacgggtacaatcctggttaaggacattgctcagttgtagagcggaatcgttgttcatcataatttcacctgagctgcccttatccgcgggctgcggataagggcgatcgcccggacaattagtgttgtttcagtttatctttatgttttgttaactgtcttgccagcttatcgataagaccatcgatagcagcatacatatcctgcccttccgcactggcatggatttcgccaccgttgacatgcaaattggcgtccgcgatttgcgtcaccttctctacttttaacacaatatagacctggttgatcctatcgaaaaactgctccagtttgctgaacttcgtagtgacgaagtcgcgcatggcgggagtgatctcgacgttgtgtcctgtaatgttgagctgcatagtgtcttccttatcggttgtgtcagaccagttgtttgcgctggtttgacggcggaatggataaagactctcggtacttagcaacagtgcgccgcgccaccataataccctgatcggagagcatggtggtgagcttgctgtcgctcaacggcttcgcggggttctccgcggcgattaacttcttcaccagcgcacgaatggcggtagacgaggcttcgccgccgccttcggtattgacgtggctggagaagaaatacttcaactcaaaaataccgcgtggactgtgcagatatttttgcgtggtaacgcgtgaaatggttgattcatgcatctcgacggcctgggcgatatccgccagcaccatcggtttcataaattcttcaccctgctcaaagaaggcctgctgctgttcgacgatgcagcggctgacgcgcagcagggtatcgttacggctctcaaggctcttaatcagccagcgggcttcttgcaggttgctgcggataaactggctgtcggcgtcgttgcgcgcattattgcccatcgccgcgtattgctgattaatcttcagccgcggaatgctgtcggaattgagctcgacgacccagcggccgttaaccttgcgcaccagtacatccgggatcacgtattccggctcgctggtttgaatggactgacccgggcgcggatccagcgactggatcaggcaaaccgcctctttcagaacgtcttctttcaagcgagtgacacgcatcaggctacggaaatcgtggttggccaggagatcaagatgctcgctgataatcaatctggcttcttccagccacggcgtttctttggcaaattgtgaaagctggatcagcaggcagtcacggagatccctggcggcgacgccgaccggatcgaaacgctgtacgcgcttgagcaccgcttcaacttcctcaagaccaatttcatcatcttcgatactgtcgacaatgtcctgaatgggaatagtaaggtaaccggtatcgtcaacggcatcgacgatggaggtggcaatcgcgcggtcggtatcggtgaaaggcgtgagctcaacctgccacatcagataatcctgcaggctctgggtggtttcaccctgatagatcggcagttcatcgtcctggtagtcgacgccattacccgacggcgtgccggcggtgtagatttcatcccagctggcgtccagcgggagctcatccggcatctctttttgttcgagcgcgtcgacggtatccagggactcgcggtcctcggcttctgtggtttcaacctcttcgtgaagatcggtttgctcaagcaatgggttactctccagcgcctgctggagttcttgctggagttctaacgtagacagctgcaacaagcggatggcctgctgcagttggggcgtcatggcaagctgttggcttagccttaattgcaaaccttgcttcatgttcagggtcaatatctccggctaaaacgtctataacctctaccctatcagagtctgaagtcttccccaaggtacacgcgtttaacctgctcgtcttcaaggatttgctgcggggtgccgtgggcgatgagatggccctggcttacgatataagctcgttcacagaccgccagcgtctccctgacgttatggtcagtaatgagtacgccaagcccgctgtcgcgcaggtgttcgatgatgcgtttaatatcgataacggagatggggtcgaccccggcgaacggttcatccagcaggatgaatttggggttcgccgccagcgcgcgggcgatttcgacgcggcggcgttcaccgccggagagcgcctggcccaggctatcgcgcaggtgttcgatgtggaattcttccatcagctctttagcgcgatcttcacgctgctcgctgctgagatcgtcgcggatctgtagcaccgccatcagattatcgtagacgctcaggcggcggaaaatagaggcttcctgcggcaggtaaccgatgccgcgccgcgcgcgggcatgtagcggcagcaggctgatatcttcatcgtcaatgatgatgttgccggcgtcgcgcggcacgatgcctaccaccatataaaaggtggtggtcttaccggcgccgttcgggcccagcaggccgacgatttcaccggagttgacggtcaggctgacgtcttccaccacgcggcggcctttgtaggctttggcgagattttttgcagttaatgttgccataacggattacttacctttcttctgctgatcgccgcttttgtcctgcaactgcgaaggtaccagcaccgtagtcacgcgaccgcctttgttgctgaaggcctgcattttctgctctttcaccagataggtgattttgtcgccctgaatattgctatccagctgttccagatgcgcgttgccggtcagcaccacgaaatcgttctgcagttcataatgcattttcgacgcgcggcctttcaccggcttgccgttgtcctgcatctgatagaaggtggccggattgccgaaaccgtcgatcacctctttgcctttttcaccgccagggcgggtaaccacgactttgtcggcattgattttaatggtcccttgggtgacgaccacgttgccggtgaaggtcacgacgttgccctgcatatccaacgactgctgatcggactcgatgtgaatcggctgatcggtatcgccggtttttgccagagccggcaggctggcggccagaagcgcgcttgcgagcgcaatgttaaggctgagtttgtttgttctgaatttcataagaggttctaaccttttcaatcagctcggcatttttgctgcgtaggttcccgcgcattttcaggccgctggaattaaatgttgttccgtacaacgtcaccatatcgtcagaggttacatcctgggtcaccaggtttacctgcgcgttatcggtggtaattttgcgcagttgagagtcggggctcaacgcgtcgacctcaacatggccgtaaagatacagcatacggtcgttggttaacttggctttatccgctctgattgaccaggtcggaaccttattggtatcaaaggtggtcatcaccggattggtgaaccacgatacttcttgttcggaaaagtattcgacatgctcggctatcagacgatagctcagcgcgccttccgggctgtacaccacggtatcggtatgctcgcttttatacgtcggatcgttaggattgaccgcgacggtcgcggtgtcgtccgtactcgccaggttcaggccgatcaggatcaacgcgaccagcgatagtaagatgataacccaacgtctggttttactcatattgattgccctttggcctcatcaagcttgccctgcgccaatagtaacaaatcgcagacttcgcgtaccgcgccgcgtccgccgttaattcgcgtgacgtaattcgcccgcgggagcagcagcggatgcgcatcggcgacggcgacgcttaaaccgacttccgccattaccggccagtcgatcagatcgtcgccaatataagcgacttcatccgggcgaaccgccagtttgcttaataattcacgaaacgccaacagcttatcggactgaccttgatacagatgcgtaatgcccagcgtctggcagcggtcttctaccagtttagcttttcgcccggtaataatcgcgacttcaataccggaagtcagcgcgcagcggatcccgtagccatcgcggacgttaaacgctttcagctcttcgccgttgttgcccatatagataagaccatcggaaagcacgccgtcgacgtcgaggatcagtaaacggatcttcgccgcccggtcgataaattcctggcttaccggcccgtagcaggtgtcgacctgggcatcagcattattcattattttatccttacttacactacgccagcgcgcagcagatcgtgcatatgtaccacacctagcagccggtcgccatcggcaaccagcacgcaggtgatatggcgggactgcatcaggttgagcgcatctaccgccagcatgcctggacgaatgcggatcccgcctggggtcatgacttcagcgatgctggcgttgcgcatatcgacgccggtatcgaagacgcggcgcaggtcgccatcggtgaagatgccgatgatattcatctcgtcatcgcagatggccgtcatgcccagatttttgcgggtgatttccagcagcgcgtcgcgcagggtagcctgcaggccgacgtgggggatctcgtcgccagtatgcataatatcattgacccgcagcagcagcttacgaccgagtgcgccgccggggtgcgacagggcgaaatcttcggcggtaaagccgcgcgcttcgagcagcgccacggcgagggcgtcacccatcaccagcgcggcggtggtgctggaggtcggcgccagccctagcggacaggcctctttcggcactttcacacacagatgaatatcggcggcgcgcgccatgctgctatccggacggctggtgacgcagataagcggcacctgctggcgtttaagcaccggaatcaacgccaggatttcattagattcaccggaattagataacgcgatgaccacatcctgcggcgtcaccatccccaaatcgccgtgagcggcttcaccgggatggacaaaaaaagccgaggtgccggtactggcgaaggtcgccgccattttgcgcccgatatgcccggatttgcccatacccatcactacgaccttaccgccgcagcggaaaatcgtctcacaggcgcgggtgaaatcttcattaatatactgatcgagctgggccagaccttcacgttcaatttccagaacctgacgtcctgcctgttgaaagtcaaaatccgttggcaaatctatttgcgacatgatgttaccccaattcattcaacgaagtacggcgctgaacagaacagcaccgccaaccaaaccataaagccgccgaccagcaaggcgcccgctacgcgccccggctgccgtttacgccgccagcacagcagcgcgaagatcgcgctgaccagcagcatcacgctgtagtcgcgcgtaaaagcttcagcagggaaggcgccaggggcgattaacgccggcagcccgagcaccagcacgagattaaggatattggcgccaatgatattcccgatggcgatatcgtcttccccttttcgtgcgccggcgatagcggtggccagttccggcaggctggtgccgatagcaatgaccgttaagcccaccgtcagttcgctaatggcgaaatagttcgccaacaccgtggcgttatctaccaccatacgggtggccatcggcatgacgatcatcgccaccccaagccacagcagggcgacgggcagcgaaccgccgcgcggcaactccgccagctgttcccgggtcaggctatcgctaccctgacgttccgccaggcgcgctatttttagggtaaacaccagccacagtatggccagcgccagtaaaaacagcccgtccagacgcgagagctggccatcgtagagcacaaatcccgccagtaaactgaccagcaacattagcggcaattcgcggcgcaggatatcagaatgcacggtaaatggatggagcagggcggcaagaccgagaattaatagaatattcgtaatattggatcccaacgccgtaccgatcgccagatcggtttgcccgtgaagggaggcggcggtggaaacgatgatctccggcaggctggtaccgatgctcacgaccgtcatgccgatgatgagcggcgggatccccatcatgcgacacagtattgaagcggcgtataccagacgatcggcgctgtaaactaccagcagtaaaccaattattaacagagccgttgctaagagcatctaaagtcctttcttcaggtataatcgtcgcctcgctggccgtccgtacgcagcgtaacgaattcttaattttgactttatgtgtggcaaaagtaaaacaaatgccagctttcgctaacccgggcaggtaagattctgtaaaaatgttgggtttgtggtgaaagaaagcgccatgcttagcccgaaggtttagtaaggatgattttatgagccaaactctggcgaatttagtcgaggttcgcggtattcgtttctctcggggcgaccgcgtcatcttcgatgatatctcgctatcggtgcctcgcggcaagattaccgccattatggggccatcggggatcggcaagacgaccctgctgcgtttgatcggcggccagatcccgcccgacagcggcgagatcctgtttgacggcgaaaacgtgccgcaaatgacgcgctcgcggctgtataccgtgcgtaaacgcatgagcatgctgtttcagtccggcgcgctattcaccgatatgaacgtgtttgataacgtagcttacccgctgcgcgaacatactcagttgccggatgcgctactgcacaccaccgtcatgatgaagctggaggcggttgggctacgcggcgcggcgaaactgatgccttcggaactctccggcgggatggcgcggcgcgcggcgttggcgcgggcgattgcccttgagccggatctgatcatgtttgatgaacctttcgtcggacaggatcccatcaccatgggcgtattggttaaacttatctcagagctgaatagtaccctgggagtgacctgcattgtggtatcgcacgacgtaccggaagtgttgagcattgcggattacgcctacatcgtggcggataagaaaatcgttgcccacggcagcgcgcaatcgctgcgtgaaaatagcgatccgcgcgtgcgccagttcattgatggcatcgctgacggcccggtgccgttccgctatcctgcgggcgattaccaccatgatttattaggcaaagggagctaaacgactcatgctattcaatgcgttggcagcgctcggacaccgcggcatcaaaaccaccgcgaccttcgggcgcgccggattaatgctgtttaatgccgtggtgggcaagccggaatttcgcaaacatgctccgctgctggtgcgccagctgtataacgtcggcgtgttatcgatgctgattattatcgtctcggggctgttcatcggtatggtactggggctgcagggctatctggtattaacgacctatagcgcagagaccagcctgggtatgctggtggcgctgtcgctgctgcgcgagctggggccggtggtagccgcactgcttttcgccgggcgagccggttcggcgttaaccgccgagattggcctgatgcgggcgaccgagcagctctccagcatggaaatgatggcggtggatccgctgcgccgggtgatttcgccgcgcttctgggccggggttatctcgcttccgctgttgacgatcatattcgtcgccgtgggcgtctggggcggttcgctggttggcgtcagctggaaaggcatcgacgcggggttcttctggaccgcgatgcaaaatgccgtcgactggcgaatggatctggttaactgcctgattaaaagtctggtttttgccgttacggtaacctggattgcgttattcaatggttatgacgctatccccacttccgctggaattagccgggcaacgacgcgcaccgtggtgcattcgtcgctggcggttctggggctggattttgtgctgactgcgctgatgtttgggaattaagttcatgcaaacgaaaaaaaatgagatctgggtaggtgtgttcttactggcggcgctgctggcggcgctgtttgtctgtctgaaggcggcgaacgtcacctcgttgcgtaccgaaccgacttaccgtctttatgcgaccttcgataacatcggcggcctgaaagcgcgttcaccggtgcgcatcggcggtgtggtggtcggtcgcgtcgcggatatcaccctcgatccaaaaacctatctgccgcgcgttgccatcgatatcgacgaaagctacaaccacattccggataccagctcgctggcgattcgtacttctggtttgctcggggaacagtacctggcgctgaacgtcggttttgaagacccggaactgggcaccgcgattcttaaagacggcggtacgattcaggacaccaagtccgccatggtgttggaagatctgataggccagttcctctataacagcaagggcagcgataatcagaattctgacaatgataaggcggcggctgagggtcatactgacgctacgccgcaggccggcatgacgcattaatttcaggagagacaagatatgtttaaacgcttactcatggtcgccatgctggtgattgctccactaacagccgcgcatgccgcggatcaaactaacccgtataagttgatggacgaagcggcgcagaagaccttcgatcgtctgaagaacgaacagccgaagatcaaagccaacccgaactatctacgtgatatcgtcgatcaggaactgctgccttacgtgcaggtgaaatatgccggcgcgctggtgctgggccgttactacaaagaggcgacgcctgcacagcgtgaagcctatttcgccgccttccgcgagtatctgaaacaggcttacggtcaggcgctggcgatgtatcacggccagacttaccaaattgcgcctgagcagccgctgggcagtgcaaccatcgtgccgattcgcgtgaccatcctcgacccgaatggccgtcctccggtacgtctggacttccaatggcgtaaaaatacccagaccggcaactggcaggcttatgacatgatcgccgaaggcgtcagcatgattaccaccaaacaaaacgagtggagcgacctgctgcgcacgaaaggtgttgatggtctgaccgcgcagctgaaagctatttctgcccagcctatcactctggatcagaagaaataatgagcgaacaactgagctggaaccgcgacggtgaacgcctggcgttgcgcggcgaactggatcaggaatttatactgccgctgtggaatgcacgcgcgcaggcgaccgacggcgtatccactatcgacctcagcgacgtttcacgggtcgatagcgccggggtagcgttgctggttcattttgtcgcgctggtacgtcggcagggcaaaacggcgcaagtggtagggaaaagcgaaaacctgcaaacgctggttagtctttacaaccttccggcggacatgatcccgtaaatttttcagtaggttaatgctgaagctattctgaaagccccatcaatctgttcgatggggctttttgcttgtttaagacagcgccactttcctctaagatgttgggctgttttcacactcagaaaaatgtgatcccatggaaaatcatgaaattcagaccgtgctgatgaacgcactctcccttcaggaagtccacgtctctggcgatggcagccactttcaggttatcgctgtgggtgagatgtttgacggcatgagccgggtaaaaaaacagcaggctatctacgcgccgctgatggaatatattgccgacaatcgcattcatgcgctgtcgatcaaagcgtttaccccgcaagaatgggcacgcgatcgcaaacttaatggcttttaagctgtagggatgttccctacagcgttgatgaatttttaaccgagaacagaatcaatggataaattccgtgttcaggggccgactcgcctgcagggcgaggtcaccatttccggcgctaaaaacgctgccctgccaatcctctttgccgcgctgttagccgaagagccgattgaaatccagaacgtaccgaagctgaaagatatcgataccaccatgaagctgctgagccagctgggcgcgaaggtcgagcgcaatggttccgtatggatcgatgctggcccggtaaatgttttctgtgctccgtacgatttagtgaaaaccatgcgcgcttccatctgggcgctggggccgctggtggcgcgtttcggccagggccaggtttctctgccgggcggctgcgctatcggcgcgcgtccggtcgacctgcacattaccggcctggaacagctgggtgcggaaatcaaactggaagaaggctatgtgaaggcgtcggttaacgggcgtctgaaaggcgcgcatatcgtgatggataaggtcagcgtaggcgcgaccgtgactatcatgagcgcggcgacgctggctgaaggcaccaccgtgattgaaaacgccgcgcgcgagccggaaatcgtcgataccgccaacttccttaacgcgctgggcgcgaagattacgggtcagggttccgaccgtatcaccattgagggcgttgcgcgtctgggcggcggcgtttatcgcgtgctgccggaccgtatcgaaaccggtaccttcctggtcgctgcggcgatctccggcggtaaaattatgtgccgtcatgcgcagcctgataccctggatgcggtactggctaagctgcgtgaagctggcgcggacattgaagtcggtgaagactggattagcctcgatatgcacggcaaccgtccgaaagcggtcaacgtgcgtaccgcgccgcacccgggtttcccaaccgacatgcaggcgcagttcaccttgctgaacctggtggctgaaggaacgggcgttatcactgaaaccatcttcgagaaccgcttcatgcacattccggaactgatccgtatgggcgcgcacgcggaaatcgaaagtaataccgcgatttgccatggtgtcgcgaagctgtccggcgcacaggtcatggcgaccgacctgcgtgcatctgcaagcctggtgctggcgggttgtattgcggaagggacgaccatcgtcgaccgtatctatcatatcgatcgcggctatgagcgcatcgaagataaactgcaggctctgggcgcgaatatcgaacgcgtcaaaggcgagtaattctgctgcggtagcagccctctgacgtccgtccgggggctgctatcgatctctccctcacgttaggtcttatttctcttctgacgcatcatctgcgttctgtcgatgaactgatgggtaatggggtcgtggtaacgcgatggccagataacccacggatcggttcccagcgcgttcgcaataatcaattcgcctttaggccacggacgggttagcgcgttggcaagcgtagaagagcttaatccgtgacgtcgcgactcagctgcgagggacgtcccctttttgcgaaggccggcaataatatccgctgaatgccagtcgatgaacttatccataaattctcccggtgataactgtctgcgcgtcaatacggacggccgaaatactataccctggttcttatatggttttaacaagttcccgtattgttcttgtacattcagaatatattaaggtttctggcgttatttgaagaatattggattttattggaactctcccgcgcggtgagcacgggagagaggaggggattagtggtcgcgctgaacggcgatatgcgcaaggccgatgagggcatcgcgccatggcgtatccggcagaacctgcagtgcggcgatagctttatcggcttcctcttccgcacgtttctgcgtccactccagcgaaccgcaggccgccatggtttcaagtaccgcgtcaagcagatgacgcccgttaccctgctcgatagcgccgcgaatcattgccgcctgatccggggtaccgtgatgcatagcgtgtagcagaggcagcgtaggtttgccttcgttcaggtcatcaccgacgtttttgccaaggcgctcgccatcggaactgtaatccagcagatcgtcaatcagctggaacgcggtgccgaggtaacggccataatcctgcagcgcctgttcttcttcggcgctgcaaccagccaggatgccggaacactgcgaagcggcttcaaacagacgggcggtcttactatagatgacccgcatatagttttcttccgtgatatccgggtcgttgacgttcatcaactgcaggacttcgccttcggcaatgacgtttacggcttccgacatcacctccagcaccttcagcgaaccgagacgagtcatcatctggaaggcgcgggtgtagataaagtcgcccaccagtacgctggcggcgttaccgaacgcggcattggccgtcgccttgccgcggcgcatatcggactcgtcgacgacgtcgtcatgcagtagggtcgcggtatgaataaattcgatcagtgcggcaatgttgacgtgcgcattcccctgatagccgaccgcgcgagctgcaagcacggcgatcatcggacgaatacgttttccgcctccgctgacgatgtagtagcctaactgattgataagctgaacatctgagttgagctgctcaaggattgccgcattgacacccgccatatcctgcgcggttaactcattgattttttctaaattcatcgcaaaagccgggccaaatgtcctgttaccgcgaatccaggtgggatcacagaaggattaagatagaattaaaagaagatatgattgtactgaaaaatcagcgcagataaacgttagcgtgaaagttgtgttttttttctgcgttgatcgatgatcgctcttgtcaaagggtcgcgttttgcgtaatattcgcgccctattgtgaatatttatagcgcactctgaatcacacgaagaggtgcgcggaagcggagttttatatgtacgcggttttccaaagtggtggtaaacaacaccgagtaagcgaaggtcagaccgttcgcctggaaaagctggacatcgcaactggcgaagctgttgagttcgctgaagttctgatgatcgcaaacggtgaagaaatcaagatcggcgttcctttcgttgagggcggcgtaatcaaagctgaagttgttgctcacggtcgtggcgagaaagttaaaatcgttaagtttcgtcgtcgtaaacactatcgtaagcaagcaggccaccgtcagtggttcactgatgtgaaaatcactggcatcagcgcctaagacttgagggagtagatttaaatggcacataaaaaggctggcggctcgactcgtaacggtcgcgattcagaagctaaacgtctgggcgtaaaacgtttcggcggtgaagcagttctggcaggtagcatcatcgttcgtcaacgtggtactaaattccacgctggcaccaacgttggttgcggccgtgaccacactctgttcgctttgactgacggtaaagtcaagttcgaagttaaaggcccgaaaaaccgtaaattcatcagcatcgttgctgaataagtttttcgcgtcctggtgacggatgaaagccccgcaacacgttgcggggctttttacattagaatcccggaaaaaatttctgcagggaaaacgggcatcatgaagcagcaggccggcattggcattcttttggcgctaaccaccgcgatgtgttggggagcactgccaattgcaatgaagcaggttcttgaagtgatggagccgccaacggtggtcttttatcgctttttgatggccagtattggtcttggcgcgatcctcgccatcaaaggcaaactgccgccgctgcgaatttttcgcaagccgcgctggttggttttattagcgattgctaccggcggtctgttcggtaacttcattctgttcagctcttccctgcaatatctcagtccaacggcctcccaggtcatcggccagctgtcgccggtcggcatgatggtggcaagcgttgtgattctgaaagagcgcatgcgcggtacccaggttgtaggggcgctgatgttgcttagcgggctggtgatgtttttcaacaccagcctgattgaaatctttacccgtctcacggattacacgtggggggtaatttttggtgtcgcagcggcaacggtgtgggtaagctacggggtcgcgcaaaaggtgttattgcggcgcctggcatcacagcagatactatttttgctgtacactttatgtactatcgcattactgccactcgctaaaccgggggtaatatcccaactgagcgactggcaactggcttgcctgattttttgcgggctgaataccctggtcggctacggggcgctggcggaagccatggcgcgctggcaggcggcgcaggtcagcgcgttaattaccttaacgccactgtttacgctactgttttctgatttattatcaatggcctggcccgatgttttcgccagaccgatgttaaacctgattggttatctcggtgcgtttgtcgtggttgcgggcgcgatgtattccgccattggccatcgtctttggggacgctggcgcaagcgagaagcggttgtaccgctgccccgctcaggcgaatgatttacggagagtaaaatgaagtttgtagatgaagcaacgatcctggtcgtagcaggtgacggcggcaatggttgcgttagcttccgccgcgaaaaatatattccgcgaggcggcccggacggcggcgatggcggtgacggcggcgacgtttggctggaagctgacgagaacctcaacaccctgatcgactatcgattcgaaaaatctttccgcgcagaacgcggacaaaacggtcagagccgcgactgcaccggtaaacgcggtaaagatgtcacggtgaaagtgcctgtagggacccgcgtcatcgaccagggaaccggcgagaccatgggcgatatgaccaagcacggtcagcgtttaatggtcgcgaaaggcggatggcacggtcttggcaacacgcgcttcaaatcatccgttaaccgtaccccgcgtcagaaaaccatgggtaccccgggcgataagcgcgatctgcagctcgaactgatgctgctggccgacgtggggatgctggggatgccgaatgccggtaaatccaccttcattcgcgcggtctccgcggcgaagccgaaagtggccgactatccatttaccactctggtgccgagcctgggcgtggtgcgtatggataacgagaagagctttgtggtcgccgatattccggggctgattgaaggcgcggcggaaggcgctggccttggtattcgcttccttaagcacctcgagcgctgccgcgtgctgctgcacctcatcgacatcgagcctatcgacggttccgatccggttgagaatgcgcgcattatcatcggcgaactggagaaatacagcgagaagctggcctctaaaccgcgctggttggtcttcaacaagattgacctgatggacaaagcggaggctgaagccaaagcgaaggccatcgccgaagcgctgggttgggaagacaagttctacctgatctccgcggccagccagcagggcgttaaagagctgtgctgggacgtgatgacctttatcatcgaaaacccaatcgtgcaggcggaagaagaacagaagccggagaaagtcgagttcatgtgggacgactatcaccgtcagcagcttgaagaagccgaactggaagaagatgacgaagactgggatgacgactgggacgaagacgacgaagaaggcgtcgaattcatctacaaacgttaatcctgagtaaaaagggccgcatcatccaatgcggcccttttgttttagttgttctggtacaaatctttatacagtcgactttcgaagcgcaccaatggtatgcggcggttgcgctggtcgcccggcggcaccgcatagccggagagatactgcacgaaggccatcttttgcccgctggcggtggtaatgaaacctgccaggttatataccccctgcagcgaaccggtcttcgccgaaaccttaccgtcaacgcccgcctgatgaagaccggcgcgatactgcagcgaaccatcgtgtccggcaagcggcaacatcgagataaagttgagctcgttatcgtgctgagcgatgtactgcaatacctgcatcatggttgccggcgcgatcaggttgtgccgggacaggcctgagccatcggcgataatcgtgttaccgaggtcaatacccgcctgctggcgcagaatttgccgcaccgcgtcggaaccggcgcgccaggttcccggcacgcccattcgcgcgtggccgatagtacgaaacaccgtatcggcaatcatgttgtcggatttcttcaacatgatacgcagaagatcgtgcaacggcgccgattgagtcgtcgccagcacggtacccggatcgttggccagcgtctggcgcagaagagtaccgctgtaggtgatccccgcatcggcgagctcggctttcaggatcgcgcctgcatagcctgcgccatcctgaatggcgaacgccagcggcagcggctcgctgcgctgcggcaggcagccggtaagggtatagcggttgagatcgcccggcacaacgtccagctcgcagtactgcgcttctgcggagccgcgcgccagcgtccgcacctggctgaacatggtgaccggatagtaagacgccacgcggatgaaggccaaatcgcccgctttctgtgcgctatagagcgagacggagaaacagttgcgatcaacgatcgccgccgctggcggggcgctgaagcactgcgtcatatcgttccatggccagccgggagccttatcgtggctggcgaaaaccgaggtatcgataagcacattgccttcaatacgctgcacgccggcttttttcagcgacgccaccatgttgcggatatcctgacgctttagcgtcggatcgccgccgaagcgggcaatcaggtcgcctttcagcacaccgccgtcaagggagcctttggtttccagcgtcgtggtgaagcggaaatccggccccaactgcagcaacgcggccagcgcggtgatcaccttctgggtactggcaggcagcgccatctgctggctgtgaaagtctatctccggcgtcggggagccaaccttctgtgccataaaggcaaggttcgcgccggcaggaagctggctgatgtactcgtcaatattcgcggcctgagcgctaagcgctataccggcagtcaatccgatgataaatctgggaaatcgcataatctcgcgctaacaacctgaaaccaagccgtcatactacggtgcatcaccctgtaaagtaaacgatgacccatagtgaacttcagggtaaaatgcgtatcaaattgaaaattgctgctgacctggggagtgtttcccgggtcggttttctttttgcttcggccatggctaagacgtgaccgatggcggaacgactccgtccgttccatgaaggaatgataaagaggtataacaaatgcaagctattccgatgaccttacgtggcgcagaaaaactgcgcgaagaactggatttcctgaagtccgtacgtcgtccagaaattattgctgctatcgctgaagcgcgtgagcacggcgatctgaaagagaacgcggaataccacgcggcccgcgaacagcagggcttctgcgaaggtcgtatcaaggatatcgaagcaaaactgtcgaacgcgcaggttatcgatatcactaagatgccgaataatggccgcgtgatttttggcgccacggtcagcgtgctgaacctggataacgacgaagagcagacttaccgcatcgtgggcgatgatgaagctgattttaaacagaatctcatctctgtgaattcaccgatcgcccgcggcctgatcggcaaagagcaggatgacgtcgtcactatccgtaccccgggtggtgaagtggaatacgaaattatcaaggttgaatacctgtaaggcgtatttcccgctacgatgtttatagattgtaaagaaaggaaaaaggccgcatagcggccttttatcaacgtcaggagcatggcattttgctcgcctggccacagaaatccctcgttttacacaatgttgtgtcgggattcaggatattcttagcgtggcagcgagattttacgctctggcgttgggcggtacagaaccagcgttttaccgatgacctgtacgttacaggcgccggtttcacgcacgatggcttccacgatcaaggctttagtttcgcgatcttctgaggcgatcttcaccttgatgagctcatggtgccctaacgcttgttcgatctcggccagtaccccttcggtcaaaccattattgccaagcataactaccggcttgagcggatgtgccagacctttcaggtgctgtttttgtttagtactcagattcatcgtatttttttgcttacgttgggattgaaaacgggtcattctaccgccatctcccatatatcgccaaactaccgcgtcgatttttacgcagtaaagtacgatgaacccgaatgggaatgttaaatgacaggtaaaaagcgttctgccagctcaagccgctggcttcaggaacactttagcgataaatatgttcaacaggcacagaaaaaggggttacgttcccgtgcctggtttaaacttgatgaaatacagcaaagtgacaagatttttaagccgggaatgacgatagtcgatctcggcgctgctcccggtggctggtcgcagtacgcggttacgcagatcggaaacagcggccgcatcatcgcttgcgatcttttaccaatggatccaatcgtcggtgtggacttccttcagggcgattttcgtgatgaattagtcctgaaagcgttacttgagcgagtaggcgacagtaaagtacaagttgtcatgtccgatatggcgccgaatatgtgcggaacaccggcggtggatattccccgggccatgtatctggtagaactggcgcttgaaatgtctcgtgatgtattagcgccaggtggtagttttgtagtgaaggtgttccagggcgaaggcttcgatgagtatcttagagaaattcgctccctgtttacgaaggtcaaagttcgtaagccggactcttcccgcgctcgttcgcgtgaagtgtatattgtagcgaccgggcgtaaaccataaccggtagatttcaaacgaaagtttgaaagacgctggatatagagtatcctgacgctgtttttaacacagttgtaataagaggttaatcccttgagtgacatggcgaaaaacctaatactctggctggtcattgccgttgtgctgatgtcagtattccagagctttgggcccagcgagtcgaatggccgcaaggtggattattctaccttcctgcaagaggtcaatcaggaccaggttcgcgaagcgcgtatcaacggacgtgagatcaacgttaccaagaaagatagtaaccgttacacgacttacattccggttaacgatccgaagctgctcgacaacctgttgactaaaaacgtcaaagtggttggcgaaccgccggaagaaccgagcctgctggcttccatcttcatttcctggttcccgatgcttctactgatcggcgtctggatattctttatgcgtcagatgcagggcggcggcggaaagggcgcgatgtccttcggcaagagcaaggcccgaatgctgaccgaagaccagatcaaaaccacctttgctgacgttgccggttgcgacgaagcgaaagaggaagtgggcgagctggttgaatatctgcgcgaaccgagccgtttccagaagctgggcggtaaaatcccgaaaggcgtcctgatggtcggccctccgggtaccggtaaaacgctgctggcgaaagctatcgccggcgaagcaaaagtgccgttctttactatttccggttctgacttcgtagaaatgttcgtcggtgtcggcgcgtctcgtgtacgcgacatgttcgaacaagctaagaaagcagcgccttgcatcatcttcatcgatgaaatcgacgccgtcggtcgtcagcgtggtgccggtcttggcggtggtcacgatgagcgtgagcagaccctgaaccagatgctggttgagatggatggtttcgaaggtaacgaaggtatcatcgttatcgccgcgactaaccgtccggacgttctggacccggcattgctgcgtccaggccgcttcgaccgtcaggttgtcgttggtctgccggatgttcgtggtcgtgagcagatcctgaaagttcatatgcgtcgcgtaccgctggcgccggatattgatgcggcaatcattgcccgtggtactcctggcttctccggtgctgacctcgcgaacctggtgaacgaagctgccctgtttgctgcccgtggtaacaaacgcgtcgtctcgatggttgagttcgaaaaagcgaaagacaaaatcatgatgggtgcggaacgccgctccatggtgatgacggaagcgcagaaagaatcgaccgcgtaccacgaagcgggccacgcgattatcggtcgtctggttccggaacacgatccggtacacaaagtgacgattatcccgcgcggccgtgcgctgggtgtgaccttcttcctgccggaaggcgatgctatcagcgccagccgtcagaaactggaaagtcagatctccactctgtacggcggtcgtctggcggaagagattatctacggtgctgaacatgtttctaccggcgcgtccaacgatattaaagttgcgactaacctggcgcgtaacatggtcacccagtggggcttctccgacaaactcggcccgctgctgtatgccgaagaagagggcgaagtgttcctcggccgtagcgtcgcgaaagcgaagcatatgtctgatgaaaccgcgcgtattatcgaccaggaagtgaaatcactgattgagcgtaactacggtcgtgctcgccaactgctgaacgacaacatggatattctgcacgcgatgaaagatgcgctcatgaaatatgagaccatcgatgcgccgcagattgacgacctgatggctcgtcgcgatgttcgtccgccggcgggttgggaagaaccaggttcttctaacaactcaggcaacaatggcaccccgacggcgccgcgtccggttgatgagccgcgtacgcctaacccgggtaataccatgtcggaacagctgggcgacaaataagtctccacgctttgctaaagtgctcagactaataagggccgcagcctaatccgctgcggcccttttgtttttattcgcccgtctttaccggctggctgtgagattctttttgggaacctaactatggcgatggcgtgctatcgtccaacgcataaaatgttttcgggatggtggcggcttcaacacgcgcggatgcgccgtctgtctgataatattcattttttgaatatttaaacgccggggcttcattatcctgttgaggaattgaatgatgtcaccgccagaatctctaagatggtgcgggccgaaccctgtccgtactacaactgtacaaaaccatagcggaaagaaaacatgcaattacacgcccaggggtcaacgctcgatctctcccatccgcatgtgatggggatccttaacgtcacgccagattccttctccgatggcggcagtcataattcgttgatagaggcggttaagcacgccaatctgatgattaacgccggggcgactattattgatatcggtggtgaatcaacccgtcctggggcggcggatgtcagcgtcgaggaagagctggcgcgggtgatcccggtggtagaagcgattgcgcagcgttttgaagtctggatctcggttgatacctcgaaagccgaagtcatccgcgagtccgcgcgcgctggcgcgcatatcattaacgatatccgttcattaaccgagcccggcgccctgcaggccgccgcgcaaaccgggctaccggtgtgcctgatgcatatgcaggggcagccgaaaacaatgcaggaagcgccgaagtacgaagatgtttatgccgaggttgaccgtttttttgctgaacacattgtgcgttgcgaacaggcggggatcgcaaaagaaaaattgttgctcgacccgggattcggattcggtaaaaatctttcccataactatgaactgcttgcccgacttggggagttccatcattttggcctcccgctgctggtggggatgtcgcgtaagtcgatggtgggtcagctgttgaacgtggggccgtcggaacggctgagcggcagcttgtcctgcgcagtcattgctgcaatgcagggcgcgcagataattcgcgtccatgatgtcaaagaaacggtagaagcgctgcgcgtggtggaagccactctggccgctaaggaaaataaacgttatgagtaaccgcaaatattttggcaccgatggtattcgtggccgcgttggcgacgcacctattacgcctgagttcgtgctgaagctgggttgggcggcaggtaaagtgctggcgcgccatggctcacgtaaaattattatcggtaaagacacgcgaatttctggctatatgctggaatccgcgctggaagctggcctggcggctgcgggcttgtccgcttcgtttaccggccctatgccgacgccggcaatcgcctatctgacccgcgccttccgcgctgaagcgggaatcgtcatctctgcctctcataaccctttctatgacaacggtattaaattcttctctatcgaaggcactaagcttccggatgacgtcgaagaagcgattgaagcagagatggaaaaagagctgacctgcgttgattccgctgagcttgggaaagccagccgtatcgtcgacgccgccggccgctatattgagttttgcaaaggcaccttcccgaatgagctgagcctcggctcgctgaaggtggtggtggattgcgcccacggcgcgacttaccacattgcgccaaatgtattccgcgaattgggcgcgcaggttatcgcgatgggctgtgaacctgatgggctgaacattaacgaagaggtcggcgcaaccgacgtacgcgcgctgcaggctcgcgtgctggcggaaaaagccgatctgggtattgcctatgacggtgatggcgatcgcgtcattatggttgaccatgaaggcaacaaagtcgatggcgatcagatcctctatattatcgcccgtgaaggcttgcgccagggccagctgcgcggcggcgcagtcggcacgctgatgagcaacatggggcttgagctggcgctgaagcagcttggcattccgtttacccgcgcgaaagtgggtgaccgttacgtgctggaaaaactgcaggaaaaaggctggcgcattggcgcggaaaactccggccatgtgattctgctggacaaaaccaccaccggcgatggcatagtcgccagcctgcaggtcgtggcggcgatggtgcgcaatcatatgagcctgcacgatctgtgcagcggtatgaaaatgttcccgcagattctggtcaacgtacgctttaccgaaggcagcggcaacccgctggaacatgacagcgtaaaagcggtcactgccgaagtagaagctgcgctggggaatcgtgggcgcgtgctgctgcgtaaatccggtactgaaccgctgatccgcgtgatggttgaaggcgagcatgaagcgcaggtgaaggaatttgcccaccgtatcgccgatgcggttaaaagcgtataactatcgcagctaagtgattaaaaaggcggctcttgctgcctttttaagcatataaaaacgctttttgctgtttttttccgcagttgatacaatacgccaaaattgcccttgcgaaggttattcgctttggttagtattcacacccgcttcagtgggaaatattaaaacgtcccgctttattggtgaagcacttggtatgcggcgaatccgcaaggaacaggttgattatgtacgaagctcttttagtaattttccttattgtagcgattgcccttgttggcctgatcatgctgcagcaaggtaaaggcgctgacatgggagcctccttcggagcaggcgcttccggcacgttgtttggttctagcggttctggtaacttcatgacccgtatgaccggcattctggccgcgctgttcttcatcatcagtctggcgctgggtaatatcaacagcaacaagaccaataaaggaagtgagtgggataatctgagtgcgccgaagtctgagcagactcagccaaccgcaccggctcagccggccagcgatatcccgcactaagtattctgtaccgaggtggtggaattggtagacacgctaccttgaggtggtagtgccctaacgggcttgtgggttcgagtcccatcctcggtaccaatattccagagaaaagacgctgaaaagcgtctttttttgtttttgttccctctatgcgttgtttatttataaacaacactccgctggttttgatccccgagaaatcgctaaagtcgccctcatcaattttgacgaggttcagtgacgccatgcgtactttaaaagtagttatcattgccggtgtattgggcctggccggatgcagcagtcattcgtcgccagaaacagtagacacgttgaataccctgcaggtgccggttataaataattccgcggccgcgccggaatcatcaacggtcgttaactattttcaggataacagcctgcttatcagcaagttaagccagtcgctcaaaagcaactatttacaggatgtagataaacgggatgtctttgataaagatagcgaggcgtatcaggtttacggggcgttaaccaaacttgaacaaatggcttcgatgaacgacgtctaccgtaaagagaacaatattgcgggcttgcaggaaattaataaactgctgaaaaccataccatctcttgcataaaaagagggattgccggcaggcaatcccgtttgccgcgcttagaaacggaaattgaaacccgcataggcgccatccgccagaacgttatcgcggtggtcatgtttacccgccatatcgatatagcgatagcccgcttcgatgctcatggatttgatgatattgacgcgtaagccggcattggcttcgagatattcatcaacgccgctggacatggaatccggggaataataagcctcaccgaacaaggtaaagaaatcgccaagcggtagttgagcaccgccgccgagggcaatcgcatagccttcatcgccatcgttcggattcagatataccgctttaccgccagccgtcagcaggaacggaccgagatcaaagttatagcccatgcccaatcccaccgtatcgccatcgttatcgctatgcgcccagttaccgttaaaggtcattccgggagcctgcgggttaaagctggctgataagttggtgaattctgaaccggcttcaccgtgaagattaacggaagcgaaggcggcgctgctggcgctcagggccgcgataagcaggatggatttcaatctgaacatgctcattattcatattccttcgggtaaaaaaatgcccgatacgagcgctcgggcaaaattaacgggtttctggtttaatagttatgtgcagaatagaagcatttatcgcccgccgttaccgtttatatgtttaattttaaacaatggccgagggcgataagttgctggtcaagcggggactaaaacttctcaggcagggaggtgatactctgtaaataaccaccgcgggcaaactcgatatagccgccctttttcaacgctgataacacattcagaatactgctgcgcgacaaatgtgtgcggtcctgaatatattccagcatggatacccgcgagcgggtctcttcaggaagcagtaacatttccattaaatgattacgaatgaccgaataagtccgctgttgtaatactaaatcgtcgcgatacaccaaataggaggtgtggtaagccagcagccgggtgacctcttcccacatgttatgctcactgaagagttgcatggctttatcgctgtcaatccgcaggatctccgtatcgacttccgcacgaaggccatggctacggctgggctgcagcatttcggctacgccaaacaggtgcggctcatagacggtgaccataagtaatctgtccgatgagcgaaaaatggatagctcacctttcttaaacagataaagctggattttgcctttatattcccagctaagccttttccttgcgaccatatttattggcgtggcatgcggttccagcaacgacatcagacgattgatcgcgtcttgcggccgaacgggaggtttaatattcattgcgatcctctcggtataagagtacaggtattcgataaattatagatggtgattattaaaaatagtgatgtcataaactataacgataaagcagagttgttatttaggatttattgcggaaataaaaaagccggcgggttagcgccggctggagagtttggcttcgcggtttatttatcgcgattttccaggttttcaacctgtggcagaccggtggcggaagacgcgctgagtagcccggattgggcatagccgaatagcttctcacgggtatcggtaatgtccaggttgcgcatggtcagctggccgatacgatcttcagcggtaaacatggaatcgcctttttccatggtcagacgctctgctttataggtcaggttgtctgaaacggtattcaggattgagtagtcgttgccgcgacgcagttccagagtcacttcgccggtgatctgactggcaacccaacgctgcagcgaatcgcgcagcatcagcgcctgggaatcgaaccagcgaccctgatagagcaggcggcccaactggcggccatgagcatgatattgctcaatggtatcttcgttgtgaataccggtcagcaggcgctcgtaggcgatatgcagcagtgccatccccggtgcttcatagatgccgcggcttttcgcttcgatgatgcggttttcaatctgatcgctcatgcccagaccgtggcgaccgccgatgcggttagcttccagcatcagttcgacgtcatcgctgaacgttttaccattcagcgcaaccggatgaccctgttcaaaacgcacggtcacttcttcagcggcgatttttacgctttcatcccagaacttcacacccataatcgggttgacgattttcacgctggaattaaggaattcgagatcttttgcttcgtgcgtcgcgcccagcatgttggaatcggtggaataggctttctcgacagacattttgtagtcgaatccgcaggctatcataaactcggacatttcatgacggccgcccagttcatcaatgaagtcactatccagccacggtttgtagatctgcagttccgcattggtcagcagaccgtagcgataaaagcgctcgatatcgttgcctttataggtgctaccgtcgccccagatgttgacgccatcttctttcattgcggcaaccagcatggtgccggtcacggctcggcccagcggcgtggtgttgaaataggttaagccgccggtggtgttatggaatgcgccgcactgaatcgccgcgatgccttccgccaccagttgtttgcggcaatcaatcagacgagcgccttcagcgccatactctttcgcacgacgcggaatggcctcgtagtcgtcttcgtcaggctggcccaggttcgcggtatatgcataaggaaccgcgccttttttacgcatccacagcagggcggcgctggtatccagcccaccggagaaagcaataccaatacgttgaccaaccgggagatgcttaagaatcgtcgtcataaaataaaaccctgctagatagactgtggtgagttcgactcaacaacaaatttgcatttttatgcactaattgtgagttttcatttaatcatcttttgctggcgacaggaagagcctgatggtgattttgctaaaaaagcctgaaatgccagcataaacggcaagcgggtggtgtaaaatggatgttgacaaaatatatgatttatcgatacaattcaccacgattttatgtcccgtcctcggtaccaaatcccagcagtatttgcgtcttttactcagaaagagtaaaatatgccacgtttcaggcgcggggtggagcagcctggtagctcgtcgggctcataacccgaaggtcgtcggttcaaatccggcccccgcaaccactttcccattaagtactttttcaaatatactgtgaggactaggtccttcgtagccggatttgaaagaattcttctggaaggtgttccagatcgcaattgcggtctcagggttcagttatctaaagccccgatttatcggggttttttgttatctgacttcagaataactgggctatacgccctttttttatgtcttgggggtgggtttgtccacattagagcaaaaattaacagagatgctcactgcgccagttgaagcgcttggctttgagctggtcggcatcgaatttattcgcggtcgcacatccacactgcgcatctatattgatagtgaagatggcatcaatgttgatgattgtgctgatgtgagccaccaggtcagtgctgtcatggatgtcgaagatccaatcaccgtcgcttacaacctggaagtctcttcgcctggtctcgaccgtccgatgtttactgctgaacactatcaacgtttcaccggtgaagaagtttcgctggtgctgcgtatggcggtacagaaccgtcgtaaatggcagggcattatcaaagcggtagacggtgagatgatcacggtaaccgtcgaaggcaaagatgaagtgttcgcgctgagtaacatccagaaggcgaacctggttccccacttttaacagtctggattgaggtgaaaggccccgatgaacaaagaaattttggctgttgttgaagccgtttccaacgaaaaagcgctgccgcgcgagaagattttcgaagcgttggaaagcgctctggcaacggcgaccaagaaaaaatacgaacaagagatcgacgttcgcgtagaaatcgaccgtaaaagcggtgatttcgacaccttccgtcgctggctggtggttgaagaggtgactcaaccaactcgcgagatcacgctggaagcggcgcgttacgaagatgaaagcatgaacgtcggcgactacgttgaagatcagattgaatctgtcaccttcgaccgtatcaccacgcagaccgctaaacaggttatcgtacagaaagtacgtgaagctgagcgcgcgatggttgtcgatcagttccgcgagcacgaaggtgagatcatcaccggcgtggtgaaaaaagtaaaccgcgacaacatcactctggatctgggcagcaacgctgaagccgtgatcctgcgtgaagatatgctgccgcgtgaaaacttccgtccgggcgaccgtattcgcggcgtgctgtacgccgttcgtccggaagcgcgcggcgcgcagctgttcgtgactcgctccaaaccggagatgctggtcgaactgttccgcattgaagtgccggaaattggcgaagaagtgctggaaatcaaagccgcagcccgcgatccgggttctcgtgcgaaaatcgccgtgaaaaccaatgacaagcgtatcgacccggttggcgcttgcgtaggtatgcgcggcgcgcgcgttcaggcggtttctaccgagcttggcggcgagcgcatcgatatcgtcctgtgggatgataacccggctcagttcgtgattaacgccatggcgccggctgacgtcgcgtccatcgtggtggatgaagataaacacaccatggacatcgcggtagaagcgggcaacctggcgcaggcgatcggccgtaacggtcagaacgtccgcctggcatcacagctcagcggctgggaactcaacgtcatgaccgttgatgacctgcaggctaagcaccaggctgaagcccatgccgctatcgataccttcaccaaatatctcgatattgatgaagatttcgcaaccgtactggttgaagagggcttctcctcgctggaagaactggcctatgtgccgatgaaagaactgctggaaatcgacggccttgatgaagcgaccgttgaagcacttcgtgagcgtgcgaaaaacgcactgactacactggcgctggctcaggaagaaagcctgggagacaacaaacctgccgacgatttattgaatctggaaggtttggaccgtgctctggcgtttaagctggctgcccgtggtgtttgtacgctggaagatctcgccgaacagggcgttgatgacctggctgatatcgaaggtatgaccgacgagaaagctggtgaactcatcatggctgctcgcaacatttgttggttcggcgacgaagcgtaataaactgtagcaggaaggaacagcatgacagatgtgactattaaagcgctggcctcagaaattcagacctctgtggatcgcctgatacagcaatttgctgatgcaggtattcgcaaatcggctgatgattctgtgaccgcgcaagagaagcaaaccttgttaacgcacctgaaccgtgaacacggctcggcgcctgacaagctgacgttgcagcgtaaaacgcgcagcacgttgaatattccaggtaccggtggaaagagtaaatcggtacaaatcgaagtccgcaagaaacgcacctttgtgaaacgcgatccgcaagaggctgaacgcctggccgcggaagagcaggcgcagcgtgaagcggaagagcaagcccgtcgtgaagctgaagaagcagctaagcgcgaggcgcaattaaaagctgaacgtgaggccgcagaacaagctaaacgtgaagtcgctgaaaaagcgaaacgtgaagccgcggaaaaagacaaagtgagcaatcaacataccgacgaaatgaccaagaccgcccaggctgaaaagacccgccgtgagaacgaagcagcggagctgaagcgcaaatcggaagaagaagcacgccgcaaacttgaagaagaagcgcgccgtgtagcggaagaagcacgccgtatggctgaagaaaatgaaaaaaactggagtgaaactccggaaaccccagaagaaacgaccgactatcacgtaaccacgtctcagcatgcgcgtcaggctgaagatgataacgatcgtgaagttgaaggcggtcgcggccgtggccgtaacagcaaagctgctcgcccggcgaagaaaggcaacaaacacgctgaatcgaaagctgaccgtgaagaagcccgtgcggccgttcgcggcggtaaaggcggcaaacatcgcaaaggttcttctctgcagcagggcttccagaagccggctcaggccgttaaccgcgatgttgtgatcggcgaaaccatcaccgttggcgagctggccaacaaaatggcggtcaaaggttctcaggtcatcaaagcgatgatgaaactgggcgcgatggcgaccatcaaccaggtcatcgaccaggaaaccgctcagctggttgccgaagagatgggccacaaagttatcctgcgtcgtgaaaacgagctggaagaagcagtaatgagcgaccgtgacaccggcgctgcggctgaaccgcgcgcaccggtagtgaccatcatgggtcacgttgaccacggtaaaacctctctgctggactacattcgttctactaaggttgcctccggcgaagcgggtggtattacccagcacatcggtgcgtaccacgtagaaaccgacaacggcatgatcaccttcctggacaccccgggccacgccgcgtttacctccatgcgtgctcgtggtgcgcaggcgacggatatcgtggttctggtggtggcggcagacgacggcgtgatgccgcagactgtggaagctatccagcacgccaaagcggcgcaggtgccggtagtggttgcagtgaacaagatcgataagccggaagcggatatggatcgcgtgaagaacgaactctcccagtacggcgtgatgccggaagagtggggtggcgaagcgcagttcatcccagtatcggcgaaagtcggtaccggtatcgacgacctgctgaacgctatcctgctgcaggctgaagttctcgagctgaaagcggtacgtaacggtatggcgagcggcgcggtcatcgaatccttcctggataaaggtcgtggtccggtagctaccgttctggttcgcgaaggtactctgcacaagggcgatatcgtactgtgtggctttgaatatggccgcgtacgtgcgatgcgtgacgaactgggtcgcgaagtgctggaagcgggtccgtccattccggtggaaatcctcggtctgtccggcgttccggctgcgggtgatgaagttaccgtcgttcgtgacgagaaaaaagcgcgtgaagttgcgctgtatcgtcagggcaaattccgtgaagttaaactggctcgccagcagaaatctaaactggaaaacatgttcgctaacatgaccgaaggcgaagttcacgaagtgaacatcgtgctgaaagcggacgtgcagggttctgtcgaagcgatttccgattccttgctgaaactgtctaccgacgaagtgaaagtgaagatcatcggttccggtgtaggtggtatcaccgaaaccgacgcgaccctggctgcagcttccaacgcgattctggttggcttcaacgttcgtgccgatgcttccgcacgtaaagttatcgagtcagaaagcctggatctgcgttactactccgtcatctataacctgatcgacgaagtgaaagcggcgatgagcggcatgctgtctccggaactgaaacagcagatcattggtctggctgaagtgcgtgatgtcttcaaatcgccgaaattcggcgccatcgcgggctgtatggttaccgaaggtacgattaaacgtcacaacccaatccgcgtactgcgcgacaacgtggttatctatgaaggcgagctggaatccctgcgccgcttcaaagatgacgttaacgaagtccgtaacggcatggaatgtggtatcggcgtgaagaactacaacgacgttcgcgttggcgatatgatcgaagtgttcgaaatcatcgaaatccagcgtagcatcgattaatcgtcagatagctaagcgtaggccgggtaagcgaagcgccacccggcaataattttaaaaaggggcttttggccccttttttgtctttattctggagaatttattatggcgaaagaatttggtcgcccgcagcgcgtggcccaggagatgcaaaaagaaattgccatcatcctgcagcgtgaaatcaaagacccgcgtctgggcatgatgaccaccgtttccggcgtggaaatgtcccgtgacctggcctatgccaaagtgtatgtcaccttcctcaacgacaaagatgaagccgcggtgaaagcgggcatcaaagcgctgcaggaagcctctggctttatccgctctctgctgggcaaagcgatgcgcctgcgcatcgtgccggaactgactttcttctacgacaactcgctggtcgaagggatgcgcatgtccaacctggttaccagcgtggtgaaacacgacgatgagcgtcgtgtgaacccggacgacagcaaggaggactaatgagtcgtcctcgtcgtcgcggccgcgacgtgcacggcgtattgctgctggataagcctcagggcgcctccagcaacgatgtgctgcagaaagtaaaacgtatttataatgccaaccgcgctggccataccggcgcgctggatccgctggcgaccggtatgctgccggtctgccttggcgaagcgactaagttttcccagtatctgctggattctgataagcgttatcgcgtgatcgccaaacttggtcagcgtacggatacctccgacgccgatggccaggtggtggaggaacgcccgctaacctttaacgaagaacagctggcggcggcgctggatagcttccgcggcgagactcagcaggtgccgtcgatgtactcggcgctgaaatatcagggtaaaaagctgtacgaatacgctcgtcagggcattgaggttccgcgtgaagcccggccgattacggtctatgagctgctgtttattcgccatgaaggcgatgaactggagcttgagatccactgttcgaaaggtacctacatccgtacgattatcgatgatttgggcgagaagcttggctgcggcgcgcacgtgattttcctgcgtcgcctggcggtgagcaaatacccggtcgagcggatggtgaccctggagcaactgcaggcgctggtcgaacaggcggcggcagaggatattcccgccgctcaactgcttgacccgctgctgatgccgatggatagcccggcgtcggattacccgctggttcatattccggaaacttccgcggtctactttaaaaacggtaacccggttcgtcagtcaggcgcgccgctgaacgggctggtgcgagtgatggaaagcgagtccggtaagttcctcggtatgggcgaaatcgacgatgaaggccgcgtcgcgcctcgtcgtctggtggtggaatacccacagtaagcgcttttgttgcgataaaagcctgctacgagtagaatatcgccgcttaacgtccgctaaagtgttttaacattttcgggcgttgcatcaggggttgctgaattagagatcggcaccctttctttacttataattttggagtttgaaaatgtctctaagcgttgaagctaaagcacaaatcgtttctgagttcggtcgtggcgcaaacgacagcggttctactgaagttcaggttgcactgctgactgcacagatcaaccacctgcagggtcactttgcagagcacaaaaaagatcaccacagccgtcgtggtctgctgcgcatggtttctcagcgtcgtaaactgctcgactacctgaaacgtaaagatgttgcacgttactcttcgctgatcgagcgtctgggtctgcgtcgctaattctgcgagtttcagaaaaaggggcctcacggccccttttttcgaccaggcggcagcaattcattaaaaactcatgtattgttgctattaatgatcttcatgcagaggttcgcgcggctaatgagaggcttcatccgcaggggcgggtaaaggttgtcattagtcgcgaggatgcagaggatcgggtcatcaggcgcgatatcgtagatatggcgtcatttttagataaaaggatagaattttgcttaatccgatcgttcgtaaattccagtacggccagcacaccgtaaccctggaaaccggcatgatggcgcgccaggcaacggccgctgtgatggttagcatggatgacaccgcggtattcgttaccgttgtgggtcagaaaaaagcgaagccgggccaggacttcttcccgctgactgttaactaccaggagcgtacctacgctgccggtaaaatcccaggtggcttcttccgtcgtgaaggccgtccaagcgaaggcgaaaccctgatcgcgcgtctgattgaccgcccggttcgtccgctgttcccggaaggcttcgttaatgaagtccaggttatcgctaccgttgtttccgttaacccgcaggttaacccggatatcgtcgcgatgatcggcgcttccgcagcgctgtcgctgtccggtattccgttcaatggcccaatcggcgccgctcgcgtgggttacatcaacgaccagtacgtactgaacccaacccaggaagagctgaagtccagcaaactggatctggtggttgccggtaccgaagcggccgtactgatggttgaatccgaagctgaactgctgagcgaagaccagatgctgggcgcggtggtctttggccacgagcagcagcaggttgttattcagaacatcaacgacctggtgaaagaagccggtaaaccgcgttgggactggcagccggaagtggttgacgccgccctgaacgcgcgcgttgctgcgctggctgaatcccgcctgagcgatgcttaccgtatcaccgacaaacaagagcgttacgctcaggttgacgtcatcaaatctgaaaccatcgcgacgctggttgccgaagatgaaaccctggacgccaacgaactgggtgaaatcctgcacgctatcgagaaaaacgtcgttcgtagccgcgtactggcaggcgagccgcgtatcgatggccgcgaaaaagacatgatccgtggtctggacgttcgtaccggcgtactgccgcgtactcacggttccgcactgtttacccgtggcgaaactcaggcgctggttaccgcgactctgggtaccgcacgcgacgcgcagaacatcgacgaactgatgggcgagcgcacggactccttcctgttccactacaacttccctccgtactccgtaggtgaaactggcatggttggttctccgaagcgtcgtgaaatcggtcacggtcgtctggctaagcgcggcgttctggccgtaatgccgacaatcgacgaattcccgtacaccgttcgcgtggtatctgaaatcaccgaatccaacggttcttcttccatggcttccgtctgtggcgcatctctggcgctgatggacgctggcgtgccggtgaaagccgccgttgcgggtatcgcaatgggtctggtgaaagaaggcgataacttcgtcgtactgtccgacattctgggtgacgaagaccaccttggcgatatggacttcaaagttgcgggttctcgcgacggtatctctgcgctgcagatggatattaaaattgaaggtatcaccaaagaaatcatgcaggttgctctgaaccaggctaaaggtgcgcgtctgcacatcctgggcgtgatggaacaggcgattaacgcgccgcgcggcgatatctccgaattcgcaccgcgtatccacaccatcaagatcaacccggacaagatcaaagacgttatcggtaaaggcggttctgttatccgtgccctgaccgaagaaaccggcaccaccatcgaaatcgaagatgacggtaccgtgaagatcgcagcgaccgacggtgacaaagcgcagcacgctatccgccgtatcgaagagatcaccgctgagatcgaagttggccgtatctacaatggtaaagtgacccgtatcgttgactttggcgcattcgttgccatcggcggcggtaaagaaggtctggttcacatctctcagatcgctgacaagcgcgttgagaaagtgactgattacctgcagatgggtcaggaagtaccggttaaggttctggaagttgaccgtcagggccgcgtacgtctgagcattaaagaagcaactgagcaggctcagccagctaacgcgccggaagctccggccgcagagcagggcgagtaaggttgccgattgccctccgcttcggcggagggtctattccgggcaggatgcctttttgcagccggggaactggacgttcatccaatcgttgtcttcgggagtgggaaatgaagccttttctgcgctggtgtttcgtggcgacagctctcacgctggcaggatgcagcaactctgcctggcgtaaggacgccgtcctcgcggtaccattgcaaccgactttgcagcaagaagtgattctggcgcgcatggaacaaattcttgccagtcgggctttaaccgatgacgaacgcgcacagcttttatatgagcgcggagtgttgtatgatagtctcggtctgagggcattagcgcgaaatgatttttcacaagcgctggcaatccgacccgatatgcctgaagtattcaattacttaggcatttatttaacgcaggcaggcaattttgatgctgcctatgaagcgtttgattctgtacttgagcttgatccaacttacaactacgcgcacttaaatcgcggcatcgctctgtattacggtggccgtgctaagttagcgcaagatgatctgctggcgttttatcaagacgatcccaatgatcctttccgcagtctgtggttatacctcgccgagcgtaagcttgatgagaagcaggtgcttgaagcactgaaacagcgcttcaacaagtcggacaaagagcaatggggatggaacattgtcgagttctaccttggcgacattagcgaaaaagagctgatgacccgtctgaaggcagacgcaacggataacacctcgctcgctgagcatctcagtgaaaccaacttctatttaggtaagtactacctaagtctgggggacaaggacagcgctacggcactgttcaaactggcggtcgctaacaacgttcataactacgttgagcaccgatacgcattgttggaattatcgctcttgggccaggagcaagatgacctggcagaatcggaccagcaatagctgacgaacactcatcagccctttttttgattgccatcaccttcgcgggtgagggcgttgttgttcgttaatacacctactttgagccggttcacacttttcaatgaaaattactctaaattttcacgatgagttatgtagactggccgccattaattttgaggcacacgtactacatggctgaattcgaaaccacttttgcagatctgggcctgaaggctcctatccttgaagcgcttaacgatctgggttacgaaaaaccatctccgatccaggctgagtgcattccgcatctgctggacggccgcgacgttctgggtatggcccagaccggtagtggtaagaccgcagcgttctctttaccgctgctgaacaacatcgatcctgagctgagagcaccgcagattctggtgctggcgccgacccgcgaactggcggtacaggttgctgaagcaatgacggaattctctaaacatatgcgcggcgtaaacgtggttgccctgtacggcggccagcgttatgacgtgcagctgcgcgccctgcgtcaggggccgcagatcgttgtcggtaccccgggtcgtctgctggaccacctgaagcgcggtacgctggatctctctaaactgagcggtctggtactggacgaagcagatgaaatgctgcgcatgggctttatcgaagacgtagaaactatcatggcgcagatcccggaaggtcatcagaccgctctgttctccgccacgatgccggaagcgattcgtcgcattacccgccgcttcatgaaagagccgcaggaagtgcgcattcagtccagcgtcaccacgcgcccggacatcagccagagctactggactgcttacggcatgcgtaaaaacgaagcgctggtgcgtttcctggaagcggaagactttgatgcggcgattatcttcgtgcgtaccaaaaacgcgaccctggaagtggcagaagcgctggagcgtagcggctataacagcgccgcgctgaacggcgatatgaaccaggcgctgcgtgagcagactctggagcgcctgaaagacggtcgtctggatatcttgatcgccaccgacgttgcggcccgtggcctggacgttgagcgtatcagcctggttgttaactatgacatcccgatggattccgaatcttacgttcaccgtatcggccgtaccggtcgtgcgggtcgtgcgggtcgcgcgctgctgttcgttgagaaccgtgagcgtcgcctgctgcgtaacatcgaacgtacgatgaagttgacgatccctgaagtagaactgccgaacgcagaactgctgggcaaacgtcgtctggagaaattcgccgctaaagttcagcagcagctggaaagcagcgatctggaccagtaccgtgcgctgctggctaaaatccagccgaccgcggaaggcgaagagctggacgtggaaacgctggccgctgcgctgctgaaaatggcccagggcgaacgttctctgatcgttccgccggatgcgccgatgcgtccgcgtcgtgaattccgcgatcgtgatgaccgtttcgaacgtcgtggcgaccgtaatgaccgcggcccgcgcggcgatcgtgaagatcgtccgaagcgtgagcgtcgtgacgtgggtgaaatggaactgtaccgcattgaagtgggccgtgatgacggcgttgaagttcgtcatatcgttggcgcgatcgctaacgaaggcgacatcagcagccgctacatcggcaacatcaagctgttcggttctcactctaccatcgaactgccgaaaggtatgccgggcgaagtgctgcagcactttactcgtacccgcatcctgaacaagccgatgaacatgcagctgctgggcgatgcgcagccgcgcaccgaacgtcgtggcggcggcgagcgtcgtgaaggcggtcgtggcttcggcggcgagcgtcgtgaaggcggtcgtagcttcggtggcgaacgtcgtgaaggcggtcgtggtgaaggtcgtcgtttcagcggcgaacgtcgtgaaggcggccgcgcgccgcgtcgtgacgatgcttccgcgccgcgccgtgatgattccgcgggtcgtcgtcgtttcggtggcgatgcgtaataagcgcaatccgttagcgtaaagtaaataatacagccccgatcgtcatgattggggctttttttatttcttttgtactcgtgtactggtacagtgcgtcatgcttaacgtgagcgaagtattttcgactggagatttcggcaaatggcgacactaaccactacggccacccgaccgtctttatttggcggcgtggtgattatcggcggcacaattattggcgcgggcatgttctcgctgccggtggtcatgtccggcgcgtggtttttctggtcgctggcggcgctggtttttacctggttctgcatgctgcactccggtttgatgattctggaagccaaccttaactaccggattggctccagcttcgacaccattaccaaagacctgctcggcaaaggctggaatctggtgaacggcgtgtcgatcgcctttgtgctgtatatcctgacctacgcctatatttcggcgagcggttcgatcctgcaccacaccttcagtgaaatgtcgctgaacgtaccggcgcgcgctgcgggcttcggctttgcgctgctggtggcctttatcgtctggatgagcacgaaagcggtgagccgcatgacggctatcgtactgggcgctaaggtgattaccttcttcctgaccttcggcagcctgttggggcacgttgagccgacgacgctgtttaacgtcgtggagaagaatgcctcctatgcgccatacctgctgatgacgctgccgttctgcctggcctcgtttggctatcacggtaacgtgccgagcctgatgaaatattatggtaaggatccgcgcaccattacccgctgtctgatttacggtacgctactggcgctgggtctgtatgtggtctggctgctggtgacgatggggaatatccctcgtccgcagtttatcggtatcgcccagaagggcggtaacattgatgtgctggtgcaggcgctgagcggcgtgctgaatagccgcggtctggatctgctgctggtggtgttctccaactttgccgtcgccagttccttcctcggcgtaacgctggggctgttcgattatctcgctgatctgtttggctttgacgatagcgcgatgggacgctttaaaaccgcgctgttgacctttatcccgccgatgatcggtgggctggtgaaaccagatggtttcctttacgccatcggctatgccggcctggcggcgacggtatgggcggcgattgtgccggcgctgctggctcgcgcttcgcgtaaacgcttcggcagcccacagttccgtgtttggggcggaaaaccgatgattgcgctgatcctgctgttcgggctcggcaacgcggtggtgcatttcctgtcgagctttaatctgttgccggtttatcaataaccgcattgcccggtggcgtgacgcgcaccgggcttaccacgtcgctaacctaacaattcctctttcacctgcatcgctaaatcaaacgaatgcaggcgtgcctggtggtcgaagatctggccgttgaccatgatttcgtccgcttccgtttcgcgaagaatcgacgctaacccatggcgaactttggtcttatcgccaaccagcgacatgctcaatgcctgctgtacaccatactgctcggacgctgaccacagttgatgcatattttccaccggcggcggcaactgcccggtttcaccgcggcgcagtttaacgaaggcctgctgcatcgaggtaaagaggaactccgcatcgcgattactatcggcggcgataatattgatacataccatcgcgtacggtttttccagccgcgccgaaggtttgaagttgctgcggtacagatgcagcgcctggaatagcatgtccggcgcgaagtgagaggcgaaggcaaacggcagaccaagctgcgccgccagctgcgcgctgtacaggcttgagcccagcagccacaccggaattcgttcgccatagccgggaaccgggcgcacctgcggattagcctctcgggcatcaaaccagtccaccaactccgccacatcgcgcgggaaattatcgacatcgccgctcatatggcgacgcagcgcgcgcatggtcggctgatcgctgcccggcgcgcggccaaggccgagatcgatacgtccgggatacagcgtattcagggtgccgaactgttcggcgatcaccagcggcgaatggtttggcaacattacgccaccggatcccagatgcagggtggtggtattggcggcaagatagccaatcaacaccgaggtcgccgcgctggcaatacccaccatattatggtgctcagccagccaataacggtggtagccgcgggattccgccagttgggcgagagcgagagaatgggaaaaggcttctttagcagaagaaccctgcgggatcggcgccagatcgagcaccgagaacggaatggttttatcagtcataacagctcactttgtcgacggtgaatcttttaatagtgcattaaaaattaataaccgttgttaacaaagtgagcttttacacttcaccttacgcctgcagctccagcccggccagccgtttccagtagccattgcaatcgctgttagcggtgagatccagcggcgcagcgccattttcattggcgcggaaggcgtcgagcatggcgaaggtctcgctacccatcggcgacaggcgcaccatatccaccagaccgtgcatcgaggttaactcgttgccaaggttatagacgtagccgctcatcgtctgaatgccgttaagcacaaacacctgctggttctcctgcgacagcatgctgcgcccggttgggtacttgatgcagcaggtttcgcattcgtcttttggccggtcttccgagcgggcggtaaagcagcgcgcggaataggccagcggcagatggccgtagctcagcacttcgacttcaaactggttgcgaatacccagctcttcgcactgggtcagcaaattagccagccagtcgcgggagagttcaaccggcatacaccagcgcaccatgccctgtttcagcagcaggcgcagggtgacggcgttgtagcagttcagcgcatgacccgcgacgaagggcaacttgcgttcggcacagagattgaccacgccgaggtcgctggcttcaatcaggaattcgccgttctcgacatagcgcttcagctcgcccagttcggatgaggcctgcaccagcgcgagggtggagagcaccacctgcttgccgctgccggccagcgctttcgccatttcgatccaatcgccgactttagtggcacggcgtttgctgcataccgcttcgcccagataaatggtgtcagcgctacaatttgccgcctgctggtaaaaatctgccagcgtctcttttggccagtagtacagcaccggccctaatgaatatttcatgtttctcactgccatttacggtgataggcgccaagggtggtttgcgttccttcggacatcgaaccaagggcttccatccatgcagattgcggcacgaagttctgcggatcggctttacagcgatcgatcgcctgacgccagactttcgctacctgggtgacgtatgccgggctgcgctggcggccttcaatttttaccgaagcgatattggcggccatcagttctggcaacagttccagggtgttgaggctggtgggttcttccagcgcgtggtagcgctcgccgtcgaccaggtagcggcctttgcacagcgtcggataaccggcattctcgccatcctgatagcgatcgatcagcacttcgttaaggcgtgactccagcccctgcggcgtttgctgccagcggacgaagcgcgcgggcgaacaggcgccgacggtatttggcgattcgccggtgagatacgacgagagatagcagcggccttccgccatgatgcataagctaccgaaggcgaagacttcaagtggaaccggcgtggcgcgcgctaactgtttcacctggtgaatggataacacccgcggtagtacgacgcgggcgacgtcaaagttacggtgataaaaacgtatcgcctcttcgttagtggcggacgcctgcactgaaacgtgacgttcaatgtgcggatagcgttccgcagcgtactccagcatggcgatatcggcgaggatcagcgcgtcggcgcccaattgcgcggccatatccacagcacgctgccaacgggcataaccgtcgggatgggcgaaggtgttaatcgcgatatgtagcttgcggcgatgctggtgcacaaagctgacggcttcctgtaatttcttttcggtgaaattaaggccggcaaagtggcgggcattggtgtcatctttcagcccgatatagacggcatcggcgccgttttcgatggccgccttaagtgccgggaggttaccggcggggcagagcagctccataatttttcctgaaaaacgcggccggtcagggacgcaaaatggttaacgagctgggattttagttaaccttctggtgacaatttttgatttgaggcagttaaaagcgtattggtgggctcaatagctggcggccatcatcgcgattttgttgatttacgccgctatgtcgtttatttgatatggcacaatagcgaaactattgcatgcatggagtgaagcttgtgttggatgaactgcgttcccggctggtccgttttggcccgtctttaatgagcgtgccggttaagctggcgccttttgccctcaagcgccaggtgctggaacaagtattgagctggcaatttcgccaggcgctggcggatggagaactggagtttctcgaaggtcgctggttaagtattaatgtgcgcgatattggcctgctgtggtatacctcggtagtcgacggtcgcctggtggtcagccagcaggctgacgccgacgtcagctttagcgccgatgccagcgatctgttgatgattgccgcgcgtaaacaggatccggatacgctattcttccagcgtcgtctggtgattgaaggtgataccgagctgggtctatacgtgaagaacctgatggatgccatcgagctggagcagatgccgaaagcactgcgcgtcatgctgctgcagatggcggattttgtcgaagcaggcctgaagagcccgcagaaacctgaacagacatcggtaggtgaggcatgctgattcgagtggaaattgggattgatgcaccgggtatcgacgcgctgctgcgccgtacgttcggcagcgacgcggaagcgaagctggtgcacgatctgcgtgaagatggtttgatcacgctgggcttagtcgccactgacgatgaaggccaggtggtgggctacgttgcctttagcccggtcaccgtcgaaggcgaagagctgcagtgggtcggtctggcgccattggcggtagatgaaagctatcgcggccagggtattggccgacagctggtctacgaagggctggattcattaaatgaatttggctacgccgcggtggttacgctgggcgaaccggcgctgtatggccgtttgggctttgaacccgccgccgcgttcgatttacgctgccgttggccggacaccgctgaagccttccaggtgcaccgtctggcggatgacgcgctgcagggcgtacacggtctggtcgagtacagcgatcatttcaatcgcttctgagcccctccagcagggtctcgaacgaaccatccccggcaacgaggcgctctttctggcgcttcgttagctgcttgatgcgatactccagccgcagagcgagtgagtggtcaccaactttctgactaaacgccagcgccagttcgcctttgccgcgcagcgctttcgctcctttgccttcctgatgctgaagaaagcggcgcggaacatcggtggtaatgccggtatacaggcggttatcagcggttcgaataagatagagaaaccagcacacggtaataacgtcagtctgttagggtgtgtgcaccatagcataatggagaataaagatggatacgcttgccgcgattagccgctggctgggtaaacagcacgtcatcacctggtgcgtcgcgcgtgatgacgagctgtggtgcgccaatgcgttttacgtttacgacccggataacgtcgccttttatctgctgagcgacgaaaaaacccgccacggccagatgaccggcgaacacgcgaaggtcgccgggacggttaacggccagccaaagaccgttgccttgatccgcggcgtgcagtttaagggtgagatccgccgccttcacggtgacgaagaggctgagatgcgcaagcgctacgtcaagcgcttcccggtcgcccgcatgctgtcggcgccggtgtgggagatccgtcccgacgaacttaaatttaccgacaacacgctaggttttggcaaaaagctatattggctgcgcgactcaagccccgagcaggcgtagcgcctcgcgattgaacgccggcagatcgtctggggttcggctggtgactaactgatcgttatccagcaccacttcctgatcgtaaaactcaccgccggcgtttttcacgtcgaccacgataggtttaaccgccgtgagtttacgcccgcgaatgacatctgcgctgatgagtagctgcgggccgtggcagatggcaaagaccggcttaccgctattcacgaagtcgcgagtaaaagtgacgaagcgctcatcaccccgcaactggtccggtgaatagccaccaggcagcaacagggcgtcaaactgcgccggcgtcacgtcatcaatcgctttatcgatcgccacttcagcctcgccttgtttccctcttaccgtttttccagcctgcttctcaatcgtcacgacctgatgcccggcaagtttaaaggcctcggcaggtgaggtgaattcagcgtcttcaaagtcgtcggtgattagtacggcaatctttttactcattcttcctccgatcttttggcagtgaatgaggcatttccatgatgatggtggatacttacctcgtaagctattaagcctggaacatgtggggcaaagtgcaaggcagacaattctgcaaaggagattcgatgagtcaggtattattaaccggcgcgactggtttggttggtgggcacttacttcatctgctacagagtgagccgggcattaacgcgattactgcgccaacgcgccgtccccttgctgtggcggagggggtattcaatccacacgatccgcagttgaccgatgcactggcgcaggtggttgatcctgtcgatatcgttttctgctgcctgggcaccacgcgccgggaggcggggagtaaagaagcgtttgtgcatgctgactatacgctggtggtagatacggcgctggtcgggaagcgtctcggagcgcaacatatgctggtggtcagcgcgatgggcgctaatgcgcattcgcccttcttctataaccgcgtgaaaggagaaatggaagaggcgctgattgcgcaggactggccgcggctgaccattgcccgtccttcgatgttgctgggggatcgggagcataaacgcgccaatgaaacgctctttgcaccgctatttcgttttctgcctggagactggaaagctattcaggcccgcgatgtagcgactgccctgctcgcggaggcgctggcgccgagccatgaaggcgtccagatcctgacctcgtctcagctacgggagcgcgctgcccggcaggcggattaaccattttcaaatttggacggcaggcgtagtattcacctccttatttgttatcacttctccctggggaatgctatggctggtcagtcttcatctcaggcggcatcaccatttcaatggtggaaacccgcgctgttctttctcgtcgttatcgttggtctgtggtacgtcaaatggcagccgtattacggtaaagcctttacggccgcggaaactcacagtatcggtaaatctattctcgcgcaggctgatgtaaacccgttgcaggcggcatgggattacgcgatggtttatttcctcgcggtctggaaagcggcggtgctcggcgtgctgcttggttcgcttattcaggtgttgatcccacgcgactggctgcagaggacgcttgggcaatctcgttttcagggcacgttgctgggagcgattttttcgctgccggggatgatgtgtacctgctgcgccgcgccggtcgccgctggtatgcgtaaacagcaggtgtcgatgggcgcagcgctggcgttctggatgggcaacccgctgctgaacccggcaacgctggtctttatgggtttcgtgctcggctggcagtttgctctgatccggctggtggccgggctggcgacggtgctggtggtggcgacgctggtgcaaaaatgggtaaaagaggcggcgacgcagccggtagcggcagaagacgttagccaactgcagcgcgatgagggcacttttatcagccgctggctgcgcgcgctgtggtcgctgttctggagcactatcccggtttacatcctcgcggtgctggtactgggcgcggcgcgggtctggctgttcccgcacgccgagggcgcggtcgataacacgctgttctgggtgatcgcaatggcgatagccggttgcctgttcgttatcccgacggcggcggaaatcccgattgtgcagacgatgctgctggctggaatgggcaccgcgccggcgctggcgctgctgattacgttgccggcggtgagcgtgccgtcgctggttatgttgcgtaaggcgtttccggctaaagcgctgtggctaaccggcgggctggtggcgttgtgcggggcgatcgtcggcgcgctggcgctggtgtaatttatccggagcggggctgtggccccggcaccggattttgcgccgggtggcggctaacgccttacccggcctacggtccgtgcggcctgccgttaatttatactgccggtgctggtggcctcaaaatcgctgagacgttcccggaaggccggggcagcccgcatggatgcgggctgagggccgtgatttgcacggacgctgcctcggcccgacccgaagcctgccgggataagtcgaaggtaccacgaagtggcgattttggcggccagagcccgggagtacagagggcggcggcgactggccgccctctgtgcgctccctgcgccacggaaaacatattgcatataactcaaccaggagcgcaatgttctctgaagcgacacgcgataaacgcttttctcaagctaaaaggttgccaaccgataacagtatctacaacggatacagggcgtttatttaatataggtaaacgcggtggtgacgcggctcacgccgctaacccggctggcgatatccgccgccgcgcggccttcgcggtcggtgaccaggcccatcaggaacacttcgctattttcggtcgtcactttcacattcgaagacttaacctgatcgctgcccagcagttgggaacgaactttggtggtgatccaggtatccgacgacgcggtgcctaagccaatcggctggccttgacgcacttcattgaagacttcggtagtcccttcaacccccatcgcgatttgtttggcgcgtgaggagagatcggcggtcggcgactggccggtcagcaggactttgccctgataagcggtgacgttaatacgcgcttctttcttaatctgttcatctttccctaaggcgctgttaacgcgtagctccagggtgctgtcatcaacctgcgtaccgaccgtacgtgggtccgttgccgctttggtgccgacggctgccgtaccgactaccgctgcggcgacgcagccctgtagcagtagcgcagaaagcaggatggcgaggggcgagagagccttcatgtgttctccttattcgtcctggtgtggaaaaagcgtgttatcaatcaaatcgcacagacaattgacggtgagcatgtgcatttcctggatccgcgcgctgcggtgtgaaggaatgcggatttcaacgtcctgctgacctaacaggccagccagctcgccgccgtcgtaaccggttaacgccacgatagtcatatcgcgggtgaccgccgcttccacggctttcacgatatcccggctattgccgcgcgtagaaatcgccagcagtacgtcgccggcgtgtcccagcgcgcgcacctgtttagcatagatttcatcatgcaggcgatcgttggcgattgcggttaagaccacattatcggtatttagtgcaatggcgggtaaaccagggcgctctgtttcgaaacgattgatcatgctggcagcaaaatgctgtgcgttggcggcggaggtgccattaccacaacagaggattttgttgccgttaagcagcgactgaacgagcgtcatagccgcgcgcgagatggcgtccgggagcgcttccgcggcggcgatttgggtttgaatgctttcggtaaagcaggctttaattctgtcgagcacgggatcccttaaatctgataatacgctattcgccaaaggcgtttttcagccattggatgtcgttgccggtgaaggctaccacatcgaaacggcaatccacagtatcaaaactcccattctgtcgggagagccacaggcgagcggctttgagaaggcgttgttgcttttgcggcgtgacgctggcggcggcatcgccgtagctggcgctgcgccggtagcgcacttcgacgaacacgataaccgcgccgtcgcgcataataaggtcgatctcgccgccgcgctcgcgggcgttggcggcgataaaacgcagtccatgccgttctaaccaccgacgcgcctggctttcccaggcgtcgccggtctgtttacttagttggctgcgacgatttgcccctgttggtacttgagccatgataacttcctgttaatcacgcagtccggcgtagccgtcagatcgcccgtattgccgttcagctcgtaacctgggctctggcgcatttgcgcgaaatgattcgccagcgaccaggcatcggcgcccattgcgtacagccgcgccagcgagtagtcgttacgcacggcggagagcgcctgctgcatcagcgccgggttactgcccgccagcatcgggatttcgctatattgcaggccttccatctccagacggaaatccgggccggaggtgccttgggcgctacgggagctggcgtacagggtgacgttgctctggctgccgttgcgcatcgcgatcagcggcttgatataaccaatttgttccggggtggcgacgatataggcggcatcgatgctgccgccgctgctgaccggaacgtcgcctgggctgccgagcgagctatctacagatgagggcagcgtcgataccgggctgccggtcagcgagatgccgccgccgttgacgccggatttcagctccgccgtcgatcccagacgctgctgcagcaccgtaccgccgcccagcttcagccactcgtcggcgaaagcgctgaccacgcggtcgccaagcgcgccgcgcggcaccaacagtaacggcgtttgtttgccctgatcatgaatatgacgcgccgcgtcgcgggcttcatcttccggggagagcgcgaagtagcacaggttcgggcggttctcgactttacccggctggttaagggcgagcacgttcagcgaggtgttgcttttcatcacctcttcgacgttttctttcagcagcgggccaaccacgatggtggcgccgtcctgctgtacctgcgccagaagctggctcatcggctggctggtggtatcgtaaattttcagctcagcagcaggattggtggtcgctacctcgggctgcggctgcgcggctggcgcgttcaccggttgtgctgccggttgtgctgccggttgtgctgccggcgttgcggcaaccggggcgggtagcggagcggctgctggttttgcggcaggcgcggcctgcgtttccgctggcgcctgcaccggatcggcctggctgccggtggcggtgagatcgccgacttccgcctgcgaagggctcaccacatcattattgccggcaacattcgccgcctgggcgacctgcgccggcactgcgctgccctggaccgctggggcgccattcttcgccgcttcaaaaccctgctggatagtgcggccgaaaatcgccgcctggccgttcagaggcagcagcagggcgattttattggtcgaggccggtttatagttttgcatattcaccagtgcagtgggcagcatctgcgcccccgggttctgcggataacggatttgccagtctttgacgcccgctttcagcattgccggatcgttgcggttgtcgaaccacatccgctgcagatccaaccagccctgcagcacgttttcgtcggcattaatcaccagcgcgttggcctgctgcggagtcatcgccgtcagcgctttccacgtggcgtcgatattttgttgtttttgcttcgcctggcttagtaggggctgctgggcaatcagcgcgcgcagcagggacagagagggctgcccctggctggcgtcaatttgcgcctgccagtagcgcggctgctgatttttctcaaaactgagaggatcgagtttgctcagcaatgccttcgcgccctggtaatcgccttgcgccagtttgacttccaccgccagcagcgactgttcgcgggcttgcgtgctgttcaggttcgacggcagttggttgtacaggtcgatagcctgctgcttcttaccttcctgcagcagtgcacgaatggcgagtaattgccagttggtcttgctatcattcgtgctttgctgcatctgctgtaggtagaaactggagttggcctgcgacgtaccctgcataaacgccgtgctttgatcctgcgtgtgggtgccgcagccagcaaaaagaagagtcgccagcaatacgggcagacagcgcgcgggcttagaacgaagaaatgttgacggtaccatatgtatccagtgatatttttttggctcaatgctcaatattaaatcggcaatacggacgagacaatgaaacaacacgaatcagcggataattctcaggggcaactgtacattgtgcccactccgatagggaatctgtctgatatcacgcagcgcgcactggaagtgttgcaagctgttgatttaattgctgctgaggatacccgccacaccggtttgctgctgcagcattttgcgatcaacacccgtttatttgcccttcacgaccataacgagcagcaaaaggccgaaacacttttagcgaaattaaaagaggggcagaacatcgcgctggtgtccgatgccggcacgccgctgattaacgatcccggctaccatctggtgcgcacctgccgtgaagccaatatccgcgtcgtgcccctgccgggcccttgtgccgcgattgccgctctgagcgccgccggtttgccgtccgatcgtttctgctatgaaggtttcctgccggcgaaatcgaaaggccgccgcgataccctgaaggagctggaagaagaaccgcgcactctcatcttctatgagtctacgcaccgcctggtggagagcctggaagatatctgcgcggttctgggcgaatcccgctacgtggtgttggcgcgcgagctgaccaaaacctgggagtctatccacggcgcgccgattggcgagctggtggcatgggtgaaggaagacgaaaatcgccgcaaaggcgagatggtgctgatcgtcgaaggttttaaggcccaggaagaggcgctgccggcagccgcgctgcggactctggcgctgctacaggcggaactgccgctgaagaaagccgccgcgctggccgcggaaatccacggcgtgaaaaagaatgcgctgtataaatacgcgctggagcagcagggataatcactgcgcccgggggtaaccgggcgcggctggctattttaccggcgtcgcttcgaaaaccagcgtttgcaagggttgtagcgtaacaatagccgcttgctgatagtcagcagggaatgtcgcgttactgccgtaaacgctttttaacgtaaagcgcgacgtctctccctgcggtatctcgaaggctttagcgagatcgagataaaattgctgtggtttatctgatgggttacgcaggcctaatatcgccttatctttattccatgaggcccagccgtaaacttccagtgcggtaggatcgccgccgacccaatgggtatccaccagcacgtcggcatttgccctcgaccattttgccgcctgcgccagggtgtcccacttcactttgttaagtagcgacggcgtgatgtacagctcctgtaattgcgtacctgtcgcgaaatagctccagacctgatcggcaaaatcgctatcggtttgcggtttttccagcccgtaataggcattttcagcactgacaataccatgatacatcagtgagttaagcgggaagagcggccctttacgcacaatcgaacgataagtctcggcatcccgataagtcatccattgctgtaccggcgtccccggcccgtaaagattgatatcgtcgccctggcgccatatcgcgtcggcataaaaaagccaggaaggactggcattggtcccggtggttaaattaataaattggtcgggattggcgctgcgcatgttatgcagtaaggcaatcgatgcatcaaaatcggaagcaaactggctacccggaatatgtgaattcgcgttgcccataccatcaagcttaaaagaggtaatatgttcgtctttaatcagcttaataatctgttgattgaagttattgaaatagtgtcgcccggatagggcgaatttgccatcaaccgtttcaaaaccatactctttggcgtgagagacgcggatatctctgggcttattataaccaccccatggtgaaagccacagccccactgaactttgcatgctggctgctttttcccgaaccttactgaacccctggctgaaagcggggccgaagagccatctgccagtacgatcgtcccaaccatcatccagaagaaaggcatctaatgtgacgccgcgtccggtgataaattccttattccactcatccatccggcgtagaacatcctgctcgctataggtggtgaagaagccgatatccatccagctgttatagtgcagatagggtttataggggcggggacgcacggcattaataaagaggtttacgctgcgacgaagctgattggtttctggaaaggtgccgaagtaggccgtatagctgagcggtgtggcagggtcgatagcggtttttaattctacattcagattcgtggttgcctcataagcccaggtatttacgataggtttaccgggtagtataaaaaaggaatcagcaacgatcggtgaactattaatagcgccatcgacatagggtgcctgagattgttttttagttgggaaaaaggttattttcgctacgtctctcgattggcccaccgctgcgatagtgtaatcaatactcgcgtagtttccctttatcaggttcatcttaaccgtgacattaaaatccgggcgggtgtaatcgacgacaatagaatcattatgtttctcgacatgctttattttaaaatcagcggtgtggatgatggtttcatcaggtagtgtgagaaaaaacagttcttgcggtgaaagttgatgggcggatttttcatcttttaccttcgcggaggaatccgcatcgttaaatgaaagcgccatcgacgcgttatttaatgtgtattcagcggcggcggcgccttgagaaatcagcagggccagtaacgaaacagtgagcgcttttttcataagagagatccttgttgtcgttctatcagaggtcaataacgttagccctatcgggctaacgcgttttaatatcgtatgatgttcaggcttctgcggcctgtaatagtcggttagcggaaccgcacacgttaattttacttttcacgatttctttcatcgcatccatgccaacacgcatgtaataacgcggatcgttcccttgcgggttttcagcaaaccatgttttcaccgcggcggcgaacgcgattttgagttctgtagcgacattgaccttgcaaattcccagtgtgatagcgcggcggacatagtcatccggtacatcgcttgcgccatgcagcaccagggggacatcaaccacttcccgaatttctgccagccgttggaaatcgattttaggcgttttttgatatagcccatgagcggtaccgatcgccacggcgaggctgtcgataccggtcaattcgacaaagcgttccgcctcttgcgggtctgtgagaaatgcgctttccgcatcaacgttaagatcgtcttccatcccgccaagccgtcccagttctgcctcaacgctgcaatccagcgcgtggcaataatcgacgaccgatttcaccagcttcacattctctgcaaacggaaaatggctgccatcgatcatcgcgctgcggaccccggcattaaccttacgacgaatatccgccagcgattcatgatggtcgagatgtagcgcaattggcatcgcgtaggtggcggagtaggcatggcagagcgcgtaaatttcctccagcgcgatatgcttaaaggttcccggcgtgccggcaaggatcaccggcgatcgcatttcactgcatgcttccaggatcgcctggatcgtctcggcgttatgaatgttaaatgcaggaaccgcataacctttacactgggcatcctgcagaagatatttggtggaaataatgctcatggcgcgctccttttaagcctgccagggatgaataacaacaccttgtacgacgcgattaacggtaccgctggcggaaggcgtatccggggtgttacccacggcgagagattggttaagcgcgaagatctgggcatacatcaggaagcagaaagccagttcgacatcgctgaaacggcgtgatggcgggatgatgatatgcgggcctgcctcgataacaggatcggttcctgcggcgatggccactatccgcatggcctggcgatcgcgacgcaactcagcgagaagatccagatcgtactggcgggtataagggtggttggagataaacatcaccaccaatgtttcgttattcaccagtgatttagggccgtgacggaagccggtaggcgagtcataaaacgcggttagcttacctgccgtgagctcaagtactttcagggcggattcgcgcgcagcgccctgtagcccgccactaccgaggtaaacgatccttttccacgcttcgttgccgaaaaccccagcgttaacatcgagcagcgagttaagaatcgtctggcagcagtcagcgacatcgctgaatgtatggctattaatgaggttgggtgcgaacactgcaaggcagctggccatcatggtggtaatactgctggtcatcgcaaagccgcgatcgtgagtttctggcggcattaatagcggcagagcgttgtcgctatccaacgcggtttgatacaggctacctgcttcgttgcaggtaatgggtaagtgataacactctgtaacaaactgattcgccaatttcactgcggccacgctctccgggctattacctgaacgggcgaatgagaccagcagcagtggatgagcgggatccagataatccatcggattggtcaccagatcggtagttggaacggcgctaaaatttttaccgctatgacgggataaccatggcgcaatgatgtcgccaataaatgctgaagttccagcaccggtaaggacgatacggagatcgttttttcgtagtagcggcgtgagaaagccgtcaatctccgctcgtaaacgatcgatatgctttaaagattggatccagctgcctggttgctggcggatctcttcttcggtccaggtaccagtggttgatggcgcaggggtgtatctttctgacataacgcaatccttatggtgatgatttccgctttcggtgtgggctaatgcaggcctttcgtttcgtttcactttgacttgcttttaatgtgttaaaatttacacgaaagaaatcgaaagctcaataatgtaattaacaataaaacgaaaatagcgatgctttggcgttattttttacgtaataaattgaaattatatggtttttatttggatgtgccgtgaactaaaaagaaaggaaaagaaaggtctgcaggtaagctgcagaccagaagagataagtggacttaaagcgaaaacgcttcgccacggatccaaatgttttccacccgcagctcgttatcaactgcaatcatgtcggccatttttcccggctgtaacgatcctaattgccgatccagccctaatagacgcgccgggtgtagagaagccatatgtatagcccgttcagccgtcatcccgggtaatgaactgatggtgcgcacggcggaatccagtgacagggtactccccgccaggctaccgctgagggtacgaacgatcccatcacgcatttctaccctttcgccacataaggtgtaattaccgtcaggcatacccgccgcctgcatagcgtcggttatcagcacgatacgatctccagcgcaacggcaacatagctgcattgccgcaggatgtacgtgatgaccgtcggcaataagttcaagccaggcgcggttatcggttaatccagcgccgaccatgccaggttcgcgatgatgtaaaccgctcatgccgttgtaacaatgcaccaggccatctgcaccggcatcgaaggcggaacaggtttgttcccaggttgccgcactatgccccagcatcacccgcacgccttgccgtttgagatgacggatcgcctgcagtgccccctctttttccggggcaagggcgacgacgcgtagcgtctcgcgagaaaccgcaatcaaccgatcgaattcggcaagatccagttctctgaaccattgtgccggatgggcgcctttatgcggcggcgtgaagtaggggccttcaagatagctgccaagaatttgcgctcccggaccgcctgcgtgaacgcgtcgcgcaatacgttccagcgccgcatggatttccgctaaaggcgcggtgacggtggtcggcaaccagttggcgaccccctcacgcgctttatgtttcgcaaggaggtctaacgtatccggtgcgtcatccatgacatctacgcctgcgccgccgtggacatgaatatcgatatatgcgggacacagcagctcggcgtcgcgagtgagaacacccgcggggatcggctccagcgccacgataacgtcattttcaaaccgtagctgatggtcatcaagccagccttgctctgtgagtaagcgcctggcgcgcagtatgcggctcatataccttcctcaacagcatgatcttcccggcagcgtcccagctcatcgaccagacatgttaacccgcgatgaccgcattccagtgcctgaagacgaaaggcttcgctggttaatccttctcgttccagcaccatctctagcagtagctgcaggttagtgccggtaatgacttctcgtccgcgtttttgcatcgccagcgtggaggcgacgcgaaatggcgtgccgccaagtaaatcagtcagaaaaacaatatcttcttcgccatccagctcgtttaccgcctgctccagctgtgcggtcagcagggcggtcgtggaggattcaggaaaatctatcgcaatgaattgcgactgttcgccaaggatctgtttcattgccttttccatgccgctggcaaatccgccatgcccggtcaaaatgattcctaacatcgaaaacctcttagcgttacaggaagtgacagaatttacctacaatgcccagcgcgacggtgatgccgataaggcggagcgggctccagccgcggcgcaccagccagaacatcaccagggtataaactagcggtaaaaaggcgggcatcagcttatcgatgacatccgtttgcagtttaaccacggcatcgccggcagtgatttcaagcgttgtgcttaaacgaacataagtcgctaccagcgcgccaatcaccgtcatcccgacgatagaggcggcatggccgacttttttggtattggctttaatgagcggaatcgccgctacccccatccggtaggcatagtgcgccagaccgaagcgcaggccgagatggaccacgttgaacagaacgataaaaacaaccgcgccgaggatcgacccttgtagcgccaggctggcgccaatgccgccgcaaatcggcaatagcgttaaccagaacatagcatcgccgataccgccgagcggcgcgccaacggcgattttggtgttctggatactgttaacgtcctgcttcgagcgctccatcgccagaattatgccgatgacaaaggtcacgaggaacggatgggtattaaagaagcccatatgtcctttcattgcccgtgccagatcgcgcggattagtgtggattttctttaatgccggcaatagtccgtacagccagccggaagcctgcatacgttcgtagttgaaggacgcctgtaatagcattgaacgccaggccacccgattaatgtcttttcttgtcaggtcggccccaatgctttgatcttcataaacgttttcattaacaccagtgagcagcgtcgtttcgctttcggccacgttgggcagcgtgtgttgattagatgccatcttcgaattcctctttaggcgcagcaggttgagtcggttcgggagatttgcgtagcaggtcgataagcgccatggccagcgcggcggcagcaatggctaacaccgggagcttgagccaggccgccgcgacgaacccgatgatgaaataggggatatagacgtttttcatcatgatttttagcagtacggcaaaaccgattgccggcatgatgccgccagcgacgccaaggccatcgattaggcgctcagggagcacatctattgcggttttggcgtgttctgcgccgaagtagataggcagaaaagcacagagaaaataaaaggtacctaatgccagcaacgccaggtaattcacacgctcaataccgcgggtatcggcatttgccgccatgcgatcacagcgcgacataacccctgacatcactgagaaaaggaacgttatccccatctgaaccgcgacggcgaaggggaccgcaacgccgacggcgacgtcgggtttaacgccggtggtaatagcgaaggtggtgccgacaatggtcccgataatgacgttcggcggttgcgcgccagccagtggcgccagacccatccacaccagctccagcgtgccgccggttaatataccggtatgaagatcgccgaggatcaggcccactaaggggccaaggaccaccggacgatgcatatgggttaaaccgttgaacatatccagaccggcgataaaggcaaggatacccaatgcaatggcttgaaaaagcgaaatttccatggcgagccccttagagcagtttataaagatccattgccggttctgtcggaactccttgaatgaagcactcaacgccggcggatttcagaccgttaaaggcggcaatatcattgccgtcgacagagacggttttggcaatttgtcgtttcccgtcggcgtagtgcatattgccgacgttgatgcgcgataccggcaccccgccggaaaccagcgtcagaaaatcggcgggcgatttacataccagcaatattttttgccgatcggcggcgcgatgaatgttgtcgatgactttttgcaacgaccagaagcgcacggcaatcccctctgccagcaccatctccatcaggttctgttgtacgggatcttcagcaacctcgtcattagcaaccaggaccagattcgcccccgcgaacccgacccactgcacgccaacctggccgtggattaaacgttcatcaatgcgacttaacacaatatttggcatcgccgtttcctcttcgttgttatccgttatgagatgtcatgccctgacaggcgtcatggtattgctgcaagatgtcctggacgtggctaatgatgagttcatgcggcgtagcgctgagcgccccctcgcgaacttttacgtactgtaaaggcagatactggctaatgagcggaagcggaatggcttcatcggccagattgcgcaccagatgcgctaaagcggtgtctatctggctgtccggccagtagtagcgaacgcgatcggaatagctgtagccgcgtgctaaccgccgtgcgtggccatcgccgtggtagtggctttgccagtattccggacgatcgagcatgacgttttccagtaccatgcgtaatcccgaacaggattttgccggtacgatttcttcttcaatcgctgctaaagcgaaaagcgcttcacgcagcgcgaaagtcaacgccgggccgactttcaaaatcgcgaaatgatcgactaccagttggcgtagcgcatgcggggtctgataatccgtggaatgcgcttcaaagagcaatgtggcatagtcttccaccatagcgctgagggattttgctttttcagattcgtaatcaatgacttgtgcatgatcgaattccacgccaggctgtaccacgagcgcgataattcgcggccaaataccctcaagccccacactggtaaaggcgaccctgtgtgcatcgagagtggcgcgagccgcatccggggtggtgacttgtagagtgttgaggggttcgtgagcgccaccgggcacgggaacctcagtgccgataacgtaaacgagatccgatttgcctttcagggcaatacaggtttcttccgcgattttcgccagccttgcggcgcgttcagcgacaaggtcatcggttaagggaatgggatcgtctttgcatgacatactgcaatcgaggtggatttttttaaacccggcggcgacatagcttttaatcagatcgtcggcgtgggccatggcttgtgcgaccggaagatgttgccagcggtttggccccagatgatcgccgccgaggatgagcccgtcgcgggggaaccccagtgtatcggcaagatgatagataaagccgcagaaatcagcgggggtcataccggtataaccgccaaactgatcaacctgattggaggtcgcttcaacgagcaggggcgtatggtttgcctgggcaaaacgaatggcggactccagtaccagtggatgcgcggagcacaccgcgtaaataccattcgcttcaccctgtttgtgtcgcaccaccaattgtgtaagatgtttcactttcctctccaggtcagaaatcaacgatttaatctttcgttttgtttcgctttatagtgcttcagcgtgctttaaaaataaaacgaaagataatagttttccgatctgtttcacaaaagaaacataatgaaagctttcagcacggtgtggttccttttttgccgtgccaatagcgcttgcattctgctaaaagaaaggcgttaatagttaaaacgaaatgaaacgaaagatacagccaaggatattgttatgaacagcagcgagtcatctgccgaaaagcgcattgcgggaacaagtgaaaggcgtgagcagatcatccagcggttgcgacagcagggaagcgtccaggttaatgacctggcggaggcgtatggtgtatcgacggtcacgatacgcaacgatctggcgtttctggaaaaacagggcattgcggtgcgagcatacggcggcgcgctgatttgcgatagtcatactccaggcgttgaaccttcagttgaagataaaagcgcgcttaatacggccatcaaacgccaaattgccagcgccgccgctgagctgataaaaccgggacaccgaattattctcgactcaggcactaccacctgtgaaatcgcgcgccagctccgacagcatagcgatgttatcgcgatgactaatggaatgaatgtcgccaacgcgttgttagaagctgaaggcgtagaattactgatgacgggggggcacctgcgtcgccagtcgcagtcattctatggcgatcaggctgagcagtccttgcagaactaccactttgatatgcttttcctcggggtggatgcgatagatctggaacgtgggatcagcactcataatgaggatgaagcccgcctgaaccgtaaaatgtgcgaagtcgcggagtgtatcgtcgttgtgactgattccagtaaattcaatcgttccagtttacataaaatcatcgatacgcagcgcattgataccattattgtcgatgacgggattccgcaagaaagtctggaggggttacgtaagggcggtattgacgttattctcgtcaaatcataattcggtgtaagttgccagccggggtatgctctataacccgactggcgatagacgctgacttttagggtcacgtcaccggcgccgggttaaacaccgccagctggttatgcagaccccattgatcggagaaggttttcttacgtccgctggcgacgtcgagaatgaactcgaacagtttctgcccaacctcctcaatcgtctcttcgccggtcgcgatagtaccggcattgatatccattaagtcgtaccagcggttggcaagctcggtacgggtcgccatttttatcaccggtaccgccattaggccgtaaggggtgccgcgtccggtggtgaacacctgaacggtaataccggaagccacctgttgagtaccgcagacaaaatcgctggccggcgtcgccgcatagataagcccgcgtttcgtcgggcgctgacccggcgaaaggacttcgacgatggcgcttttacctgatttggcaattgaacccagcgctttttccactacgttggccagaccgcctttcttattgcccggtgacgggttggcgctgcggtcggttttccccagctccagatagttatcgtaccaggccatctcttccagcaggcgcttgccaacttcttcgttgatggcgcgcggggttaacagatggatagcatcgcgcacttcggtcacttccgagaacatcaccgtcgcgccgcagcgtaccagcagatctgaggcatagcccaccgccgggttggcggtcacgccggagaaggcgtcgctgccgccgcactgcataccgaccactaattcggaagccgggcaggtctctcgctgacgggcgttcagcttcgtaaggcggcgctcggcaacctgcagaatatcatcgaccatcgatttaaagccgacatgctgttcgtcctgcaaacgcactacgcttgcgctatcgacggcgatcggctgcacgtcttcggttccctgcagcagacgttccggctgcagcttttcacagcccagaccaatcaccatcacctcaccgccaaagttggggttcagcgcgatattgtggatggtgcgaatcggtacgatcgccgccggggcgttaatcgccacgccgcagccgtacagatggtttaggccgaccacgccgtcgacgttggggtattttgggagcagatcgcgttcgatgatcttgaccacataatccactacaccggcgacgcagtgcacgctggtgctgatccccagcaaattcttagttcccacgctgccatcggcattgcgatagccttcaaaagtgtatccttccagcggcggcagcggttccgggactttggtcgccagcggtaaggtgttgagcggcggcgcggtcggcagctcaaccaacgactcatcaatccagcttccctttggtatatcgcgaacggcgaagccaatcacttcgccgtagcggatgatttcaccatgggcaggaatatcgacaagggcgactttatgaccttgcgggatatgttcaacgagggtcaggccatccggaaaacgcgttccggcggataaaccgcgatcgttaacaataatcgctacattatcggtagggtgcacttttatataaaacgccgtcggcgactgttgtcgaatctcaatctcagccattgtccagtgttctccagaacggtgctaataataaaaataaaacgttaattcagcttgtgcctatcagaatgatgaaatacagaatgtcaggagttatagcagcaaaatgtgatcttggtcactgcttgcggtgacggttgccagcattgaacggcaatcctaagaactgtggattagcgcccataacctatggcatttgcataactaaaatgattattaaagcgcttatattgtgattatgcatagtgcctggtcacggtgggatgattatactgagtcatgttttgcggtgttcgatatgagaataaatagcccgcttaaaaaaataataaaagtattctttttcagaaaaatatctaaatgttcaagggtaaaagaaaataggcatcggttcgctatttaattctgcaaattatatttgtggttggcgagattaaacgtatagaacagcagaagtaagcaacgattaacccaaggtaaaatcatggataacgcaattttcccgaacaaatttaaggccgcgctggcggcccaccaggtacaaatcggctgctggtgcgctctggcgaatccgattagcaccgaggtattagggcttgctggtttcgactggctggtgcttgacgcggagcatgcgccgaatgatgtgaccacacttatcccgcaactgatggcgttgaagggcagccacagcgcgccggtggtccgcgtgccgaccaatgaaccgattatcatcaagcgcatgctggacatcggtttctacaacttcctcgtgccgtttgtcgaaaccgctgaacaggcggcgcaggcggtagcatcgacccgctatccgccggaaggcatccgcggggtctccgtttctcatcgcggcaatatgttcggcaccgtaccggactacttcactgagtctaataacaacatcgccattttggtgcaaattgagagccagaccggggtggacaacgtcgatgcgatcgccgcgaccgagggcgttgatggccttttcgtggggccgagcgatctggccgcagcattagaccatctgggcaatgccgcacatcctgacgtccagcgcgccatccagcatatcttcgccagcgcgaagaaacacggtaagccgagcggcattcttgcaccggtggaagccgatgcgcgccgctatctggagtggggcgcgaccttcgtcgccgtcggtagcgatttaggcgtcttccgttcagcaacccagaaacttgctgattcttttaaaaaataatcaccaggatgaagagagagaacattatgacaatcaaagtgggttttattggtcttggcatcatgggcaagccgatgagcaaaaatttgctgaaggcgggttattcgctggtggtatccgaccgtaaccctgaagccattgctgacgtgattgccgcgggcgcagagactgcgagcacggcgaaggccattgctgagcagtgcgatgtaattatcaccatgctgccaaactctccgcacgtgaaagacgttgcgttgggtgaaaacggcattatcgaaggcgcgaaaccgggcaccgtggtgattgatatgagctccattgcgccgctggcgagtcgcgaaatcagcgaagcgctgaaggccaaaggcatcgatatgctggatgcgccggtgagcggcggcgaacccaaagcgatcgacggcaccctgtcggtcatggttggcggcgacaaggcgattttcgataaatactacgacctgatgaaagcgatggcgggatccgtggtgcataccggcgagattggcgcaggcaacgtcaccaagttggccaaccaggtgattgtggccctgaacatcgcggcaatgtcggaggcgttaaccctggccaccaaagccggcgttaaccccgagctggtttatcaagcgatccgcggcggcctggcaggtagcaccgtgctcgatgctaaagcgccgatggtgatggatcgcaacttcaagccgggcttccgtatcgatctgcatattaaagatctggccaatgcgctggatacgtctcacggcgtcggcgcccagctaccgctgacggcggcggtgatggagatgatgcaggcgctgcgcgcggatggcctgggcaccgctgaccatagcgctctggcgtgttactacgaaaaactggcgaaagtggaagtgactcgctaacaagaagggcgtgttcccgcgccctgtcattcttgccttgcgcggcacagtcaggcgacataactatgaaaatcgtaattgccccagactcttataaagaaagcctttctgccagcgaggtagctcaggcgatagaaaaaggatttcgggaaattttccccgatgcgcaatatgtttctgttccgcttgccgatggcggcgagggaacggttgaagccatgattgccgccacgcagggtacggcgcatacggcgctggtcaccgggccgctgggggaaaaagtgaatgcccgctggggcatgtccggggacggcaaaaccgcctttattgagatggctgcggccagcgggctggcactggtgccgcctgaaaaacgtaatcctctgatcaccacttcacgcggaaccggcgagctaattttacaggcgctggagcacggcgcgaccagcattattatcggtattggcggcagcgcgaccaacgacggtggcgccggaatgatgcaggcgctgggcgcaaagctctgtgatgccaacggcagcgacatcggtaatggcggtggttcccttaactgcctgaattcaattgatgtttcgtccatggacccacgtcttaaacactgtgctattcgcgtggcttgcgacgtgacaaatccgttgattggcgaacagggggcatcgcgcatttttggcccgcaaaaaggggcgaccgaagcgctcattgacgagcttgataataatcttgcccactacgcctcggttatcaaaaaatcgctgcgcgtggaggtgaaagatgttcccggcgccggagcggcggggggaatgggggccgcgctaatggcttttctgggggctgaactgcgcagcgggattgagattgtgacgacggcgcttaacctggaagaacatattcacgactgcacgctggtggtaaccggcgaagggcgactcgatagccagagcatcaacggcaaagtaccggttggcgtagccaatgtggcgaagaaataccataaaccggtgattgctattgccggcagtctgacccgcgatgtcggcgtggtacatcaatatggcatcgatgcggtgttcagcgtactgaccagcatcggctcgctggaagaggcattccgcggcgcattcgacaatatttatcgcgcttcgcgaaatattgccgcgacgctggcgatcggaatgcgttgtgtggggtgacaaaggcgcgcgaaccctctatacttcgcgccgaagctgaccagacagtcgccgcttcgtcgtcgtcctcttagggggagacgggcggaggggaggaaagtccgggctccatagggcaaggtgccaggtaacgcctggggggtgtcacagcccacgaccagtgcaacagagagcaaaccgccgatggcccgcgcaagcgggatcaggtaagggtgaaagggtgcggtaagagcgcaccgcgcggctggtaacagtccgcggcacggtaaactccacccggagcaaggccaaataggggttcataaggtacggcccgtactgaacccgggtaggctgcttgagccagtgagcgattgctggcctagatgaatgactgtccacgacagaacccggcttatcggtcagtttcactccttagaaaaccccgcctcggcggggtttttgctatctggaggttggaacaaagatgaatgactgtccacgacgctataccagaaagaaagcggcttatcggtcagtttcacctctttaatgtaaaaaccccgctccggcggggtttttgctatctggaggttggaacaaaaatgaatgactgtccacgacgctataccagaaagaaagcggcttatcggtcagtttcacctcttcaatgtaaaaaccccgctccggcggggtttttgctgtccggagggtggaacaaagatgaatgactgtccacttttaaacagctttctggctgcattgcaggccgcgctcattgatactgtcacgctttgaaaatgtatcttctatccattaatctcaatccctcatttgcagcggtcatcattcagcttaatggatagcaggttttacgtgttatccagacaggggcggtggacgtgaaaaatgtagtgttattccctcaactcaaaacggcaatagcatggctggttggtcatggcgagacgattatgcagtttgcctggaatatcgtggcggcgctgattattctttttatcgggagaatgcttgcaaaagtcctcgccaaaaccttcgagaaaattctgctgcgacgcaacgtagatgcgacaatcgtccatttcttcgccgcgctggtgcgctatatcaccatggcttttgcgattatcgccgcgttaggccgggtagggattgaaacttcttccatcatcgcggttattggtgcggcgggtctggccattggcctggcgctgcagggctcgctgtcaaattttgccgctggcgtactgctggtgactctgcgtccattcagggcgggtaatttcgtgcaggttggttcggtatcagggatggtgcaatcggtacatgttttttctacgacgctgcttactgtagataataaagaagtcattatcccgaacggtaaaattattgccgatagcatcgttaactactcccgccatccctatcgccgcatcgatcttacgctcggcgtagcgtgtcatagccaaatatcgcacgttaaacaggttatccagacgctcatcgataatgaaaagcgcatcgatcattctcgcggtaccaccgttcgcctgattgagctggcgcccggttcgcttaactttaccattcgcgtatgggtgaaaaatgctgagtattgggacacctatttcgattttctggaaaatatcaaaaatgcgctcgatgaaaataatatcttgctggccgcaccgcgcatggatattaatttaacatcagcggatttagcacgtattcaataagtaagaagaattttatattttatataattcatttggtgaatatattatctggatatttacactggtgaacatgcttttttacacatcgtcattattgttcagggaataataggtcgtcttatcactacgtacttattcaggataacaagatgaacaaactttctcggatggtattaatgacggctctagccgcagggttctccatggcggcacaggccgctgacgttgccgccgcgccggcgccggctcaggatcccatcgttcagcatttaaaattgagccaggatcaggtcgcaaaaattaagagcctgcatcaggaaatggaaaaaaacgtccagcagatttcacagaaagatattaaagatggcgtgttatttgacgtgatcgattccggtaagtggaatgagaaagcggtgaaagatcaactggcggccttcagcaaagttgagcagcaggtacgctattatcgcgtgaagtactatttcggtgtaaatcaggtactgacgccggaacagcgtactcaggtgaaaaaagatctctctcaggcattgagcgagtaatgaaaatcggccccgctatggggccgatttctttcaggcggcgttatcttcatcctgcagccgcgtttgcgcatcttccacgatggcttccagctcactcagcatctcttcatagccaaagccgattgggctcatggtttccacagtgactggctggtctatcggtttcgcctttttgctctttttcttgctcactcacaaactcccgggcttccttgttacaccggtaaatctatcagcaaagcgcgcagcggcgtatcggcgacgagggtaatgttagcttcgtcacgaataaacgcgccatcgccgcaggttaatgcctgtttctcttccttttttgccacggcatgtaccgtcccgtgaatcgactgcagataggcgcgcgggccgtgcagttgaacgttgatctcttcgcccttcgccagctgcagatgatgaatccacacctgctgacgcagctgtaaactgtcgccgctgccgtccggtgaggctaatagctgaatcggcgaatcgccaaccgtcattttctgtaccagcgggttttcgcgctccggacaggcgtcgagccatagctgcatgcgcgtcaacgactgctctttactgagattatgctcgctgtagctgacccccggttgggtggagagctgcagggcttcgccagcttttgcctgtacatggttgccgtcgctatcgcggtattccgcttcaccttccagaatcagattcaggatatcgacctttgggtaggtgcgcggctgaaatgacgcgcccggcgccagcacttcttgattgagtacgcgcaatgaggcgtaacccagcaatttagggtcgaagtagtggccaaaggaaaaggtgtagcgggcctgcagccagccgaagtctgcttgaccgcattgtttggctgttcgggttgtaatcattttcttgacctctctttacactaaatcaatggtaaaggtatggacgctgtattgttagccagatattctgcccggtatgttcaaaattcctgaatgagagcgaaatggcgaaagagagagcattaacgctggaagcgttacgcgtaatggatgcaatagaccgacgcgggagctttgccgctgcggctgacgagctggggcgtgtgccttcagccctaagctacaccatgcaaaaactggaagaagaactggatgtggtgttgtttgaccgttccggccatcgcacaaaatttacgaacgttggccgcatgctgctggaacgcggccgcgtgctgctggaagcggcggacaagctgactaccgatgccgaagcgctgtcgcgcggctgggaaactcacctgaccatcgtgaccgaagccttggttcctaccaccgatctgtttccgctgattgagaaactggcgactaaatccaatacccagctgtcgattattaccgaagtgctagccggtgcctgggaacggctggagcagggacgtgctgatattgtcgtcgcgccggatatgcattttcgttcatcgtcagaaattaactcgcgtaagctctattcggttttaagcgtttatgttgccgcgccggatcacccgattcatcaggagccagaaccgctttctgaggtgacgcgggtgaaatatcgcggcgtcgcggtggcggataccgcgcgcgagcgtccggttctgacggtgcagttgctggataagcagccgcgtttaaccgtcagcactattgaagataaacgccaggcgctactggcggggcttggcgtggcaaccatgccgtatccgttggttgagaaggatattgccgaagggcgcttgcgggtcgtaagccctgaatataccaacgaaatcgatatcattatggcctggcgacgcgacagcatgggcgaagccaaatcctggtgtctgcgggagatcccgaaactgtttaccggcagataacgggaagatgcgctcctccgccgcgaggagcgcgtaaatcagtaggagtagggttttggatttggcccaaagcgattgttgccgggcgtgccgttctgacaattgaaaatcaaaatcaccagccagccgatgaccgggatcagcagcagcagtagccaccacgccgagcggtcggtgtcatgcaggcgacgaaactgcaccgcccaccagggtaaaaaaaccagcacgccgtaaatggtcgtcaggatgccttcacccccagcacgttgccagccgagcatcttatcaatgatgcttagcactgcggtgagaatgatgttgaccagaataaacatccagtactctttgcgccgggcacggccgccaaagccaatatagtttcgtaatacttttagataccagtccattttctcacgccttagttaaccattaatcacttgttttcaaagcgatcaaaataatcataggcgtgaaaatcaaactggtaaatatccgttatccgaataaaaggcgcccttcggcgccttatcgatcagcgggaaaaacgatcccgcccatgtggttcgttgagatcctgctgcgggcccacggagatgatccccgtcgggttgatggttttgtggctgcgataatagtgattgcggatatgcgggaaatttaccgtttccgcaatccccggcatctggtagatatcgcgcaggaaaccgtacaggttgagatagtcgctgatacggcgcttatcgcatttaaagtgggtaacatagaccgggtcgaaacgaaccagcgttgtccacaggcggatatccgcttccgttaactggttcccggtcaggtagcggtgctgaccgaggatctgctcaaggcgttcgagcgaggtaaacagcgcgtctacggcttcgtcataggcctgctggctggtggcgaaaccggctttatacaccccgttgttaacgttgtcgtagatccagctattgagatcgtcgatcttttctcgcaacgccggcggataatagtcgcccgcgcgcgcccccaggccatcaaacgcggtattgaacatgcggataatttcagccgactcattgctgacgatggtctgttgttttttatcccacagcaccggaacggtcacccggccggtgtaatgcggatcggcctgcagataaagctgatagaggaactgatgatgatagagctggtcgccggtcgcatccgggaaatcgtcggcgaaggtccagccgttttccagcatcagcggatgaacaaccgagacggatataaagggctctaatcctttcaacttgcgcagaatcagggtgcgatgggcccacggacaggccagtgaaacgtacagatgatagcggtctttctctgcggcgaagccaccttcgcccgcagggcctggcgcgccatcggcggtgagccagttgcggaaggctgaaacggaacgcttgaaccgtcctccggtggatttggtgtcataccaggtatcttgccagacgccgtcgactaattgtcccattacttcctccttcagatagcaaaagcgaggagatagcccctcgcttttttagatttttactcagtatagtgtgcttaccactttttattcagcacgcggtcgatgctgaatgcgcccggacccgtcacggccagcagcagataaccaccagcgatggtcaggtttttcatgaacatcagcgagttcacgccttcagcaaagttgctgtggaacaggaacgcggtcagcagggtaaagcctgcagtgaacagcgcagtagtgcgagtcaggaaaccgaacagaatcgccagaccgccgccaaactcaagcagaatagtcagcggcagcagcgctcccggaacacccattgcttccatatactgctgcgtacctgcatacccggtgatttttccccaaccagcggtaatgaacagaatcggcatcagaatacgcgctaccagtacaccaacatcttctatttttttcatttcttactccagaaaacccaaagggcggcgatttcgttttttagagcaatcctgcgtggttacgcgggcttgctgtcgatggagaggatattagcgagcttgagaggggattgttagcaaggaaaactgtagttctttttcaaagtttctgagcaattggtgcgatcggtgaaaatattttccgaggcgcctcgcagcgtgcgtggctatcggttgttttatcaccagaggcatcttatccttgcccgttccggccatttgaccagccctggcagattttttcgtcaactggcgcagggaatgcctgagcataaggagcaactgatgacattagcagaatggtttgaagagcgtgggcgcacaaagggaagaaaacaggggcgtgaagaaggtagagaagaaggcgaacgtcaggcgacgcgtaaaatagctcttgcgatgcttcgtaacggcgttgatagcgcgctggtcagtaaaaccaccggtttaagcgaacaagagctcagcgcgctggcgcactgagcgagcaattaacgcgatgcggactggcgcagaatccctttgaccatccgccaggtgctccagatgccgaggccgcgtttgccccagcggattaaaaagcgcggatggcgtactgaccagatagccattaccccgctgccgaccatcgcccatgaacgcaggtgtttcagcgtttgccagccgcgatcgataggcgaggtggcttccagccagtgacgatggctggcggccaaatccagccgctgttgctggatttggcgcagcagcagcgcttttcgctggtcgtgttcctgttggccgctcatcgacgatcgtcctcaagcagcgcgcgatcgttcgccagctcgtcgcgggtatgacgtaaaaacgttgagcggcgagctttcctgagggtccaaattccccctatcaatgaggcgagcaacaggacgctggtggtcgcgatcatcacatgcaggcggtactgcggatcgacggcccagatgatcagcaccagcaggctcatcagcccaaaagcggcgaatagcagcgttagcccgagcatcagcaacagctggaagaggttcgctttctcctcttccagctccacgacgaccaggcgcaaacgcgtttccaccatttcgaccagcagcgtaatgatccgctggccgatgccgaatacgctctgtcccgggccctgcgtgtgttgagagtttgccataattaacggcgcgacagcagtacgccgaccaccagcccgacagctgcgccaatacccacgccggtccacggattctcgcgaacgtactcatcggcgcgagcagcggtttcacgcgtctgcttaacgatggcatcgctggtgtcgctgagacgcacacggctgtctttcagcacgctttccgctttgctacgcagtttgccgagttcttcttttgatttatcggttgaggagttcagaacttcttccagcgtatcagccagatttttcagctcagcgcgtagatcttctgcaacgttatctttagccatcttgttctcctgtagcgtttaccaattaataatcgcgtgactcaagcgctttcagttcctgctgcgcttcatccagtttgcgttcccgtttgctaattttgtctgcatcgcctttctgcttcgcctcgctcagatcgcgctgacgttcggcaacttcggccttctgtttagcgattttccgctgatgatcggccctgactttactgtcgctgcagttagcgcgaacttcctgcagcgctctgttcaggccgtcaatgcgatgctgattatggtgtttttcggcatagctgatctcccgttggatactctgttctttttcctgacaaggagaggctgcgaaggcgctggcgctaagtgaggtcagtgccagtaatagtgcgatgcggtatttcatggattctaccttccattgtgtgaggggatatcggtgatatacccaatccagtcaacaatacgagccaggcggttcccgcagtcttaataatagacacgaaagcgggacatcaccaaaccgtacgaaaagattcggaatttttgacgcgttatccaaaacggcgcggagcatcgcgcaggcgggataaccaggcggtggcagaattttcttcatccaccagagcaataatataaccgtgaggcagagctcggcccaatacttcttttgccgcggcgccttgggcgttggagtcgaatttgatcagcaggccgtctttttgcggggtgatgctcttaaaacggatgccgttggcgtcaagatgatgccagacggaaaaaccgtccggcatagcgacgccctggctgacgggacggatggccagagtggactcatgctgactgacggtcagccacagccagacgctggcgcaaagcagcagtgagccgcccagcatccaccgcagctggcgccaggaaggacgtttgatgaccatgctcagctccgactgctgtgttttttcttccacagtacaaccagggagccgatcagaccgaagaccagcagcgcaaccggcagcagcatcaggcacgacatcagctgatcttcatacttcaggaataccggtgttttacccagcagatagccgagagaggtaagaatcaacacccacagcagaccgctcatccagttaaagaactggaaacgcgcgttattcagaccggagataccggcaatcgttggcagtagggtacgtacgaaggcgataaagcggccaattagcagcgctgataacccgtgcttgtggaacaggtgatgggctcgctggtgataatgcgacggtaaatgcgatagccagttttgcacgatccgcgtattgcccagccagcgtccctggatgtagctcacccagcagccgaggctggccgccgccgtcaaaagcagtagcgtttccgggaagcccatcgcccctttggcgatcaaaacaccgaccagcaccagcaggctatcacccggtaaaaacgccgccggcagtaaaccgttctcaaggaacaaaatcataaataagacaaaatagagcatgccaatcatggagggattagcgagcgtttcgtaatcctgggcccataaggcattcagtaattgggttagtagttccattcacgattcctggtacatcggttaacggtacgtcttatacatagcgactagattattttttagagtatggccgctgttgagacgttctgatcggatccttgattaaacagtaagtaaacacttacatgcagaacgacaaaatgcatctaattgtaacaaactagctgactttccgtcagagaaattgcagtttgttgctgattgattttgcgggttgcggggacgagtagcgagaggatttacacaggctgacactatatatgctttgcttaccctgtcgggtttgcgggcagaaaaaggggttctgcccgtggaggggataatacgttattttgccccgttcgctgcggtatcgagatgaaccaccggattttcggcaaacaggtagcgatcggcattgaattcaaagtcatcgctggtttcgttaaacagcatcagcttggtattttccagatgctgccacatcgccagcttcgccgcgtgagggtctttacgaattaacgccttgaggatttggtcatgatcgtcgcaccagttgtcgacggtgcgcaggtcgatgtggtcgtgcagttttttccagtacgggttgtgtacccgctgggtccacattttttcaacgatggcggcaagggcggtgttctgggtagccagcgcgacctggacatggaactgcaggtcccattcggaatcacggaagcacttctcgttgcgggctttctcctgaatttccattagcttcatgatgtcctgtttggtcacctgagttgcggcgaattcagcgatattgctctcaatcaactgacgggcctggagtaattcaaacggaccatagttggcgaactccagcgattcatccaccacctgttggtatttcgggtggttggaaataacgtggatgccggagcctttgcggacttcaacatagccttcgacttccagcatgatgatggcttcgcgaaccacggtgcggctgacgcttttttcatcggcgatgaagcgctctgcgggcagcttatcccctacaaggtagacgccttgttcgatacgcgtctttagctcagcggcaagctgctgatagagacggcgcggttcactgatttccatattcgctcccggaagatggcgacaatattcgatttgttataccacttttacgcgctttccaccactggaaggcacaaaaaaagccgccttaaaaggcggcttagtcggtgcaaaatcatcttgcagtttagctttgcgtcaccggtttactggtattgagcggcgtcgagtcatcgtcggccgatttgtttttcagtaccgtccagataaccagcgcgcccagcaggtcgaagaccgccagcaccgcgaacagcgggctgaagccgatggtatccgccagtgcgccgacgaccagcgcgaacatggtgctcgccagccatgccgccatcccggtcagaccgttggcggtcgccacttcgttacgaccaaagacgtcggaagagagggtgatcagcgcacccgacaaggcctggtgagcaaaaccgccgacgcacagcagcgcaatcgccacatacgggctggtgaacaggccaatcatgccaggaccaatcatcagcagggcgcccatcgtcacgaccattttacgtgagacgataagattcacgccaaaccaacgctggaacagcggtggcaggtagccgccgacgatgcagccgaggtcggcgaacagcattggcatccaggcgaacatagcaatctctttcaggttaaagccgtaaaccttaaacatgaacagcgggatccaggcgttgaaggtaccccaggccggttctgcgaggaagcgcggcagcgcaataccccagaactgacggttacgcaggatctgccacggcgacattttcttcgcgttgttagtctgatgctgagattcctggccgccgatgatgtagtcacgttcttcatcggtgagttttttctgatcgcgcgggtgtttgtagaaaatcagccaggccattgcccaggcgaagctcagtaccccggaaataataaatgccatctgccagctatgcatgacaatcgcccataccaccagcggcggagctatcatcgcgccgatagaagagccgacgttgaaatagccgacggcgatggaacgctctttcgccgggaaccattcggagctggctttcagaccggcagggatcatcgctgcttccgctgcgccgaccgcgccgcgggccagcgccaggccgccccagctgcctgccagcgccgttgaaccgcagaataccgcccaggcgatagcaaagaaggcgtagccaattttggtgccaagcacatcgagcacatagccggcaaccggctgcataacggtatatgcagcggagtaggcggcgatgatataagaatattgttgggttgaaatgtgcaactcttccatcagcgtcggcgcagccgccgctacggtgttacgagtcaggtaacccagcacggtgcccagcgtcaccagtgcgatcatataccaacgtaaccctttaattttacgcatgtaaaacctcatcgttgttgtctctccgcagcgtctgcggccatctttcgtcccgccagggaaggaggatggggaaacggagggttcaggacgtgaactgaaccttgccatcagtggttaaagtgaaaccggcatccctaccgtttaagccgatgttattcacaccggtaatgcattccgtcggtttatatgttgcgacggcagaaagataacttgtcatacaactttaaaagttgagtactgtcacaaaagtgggaaagtttgtagggacattaatcgcgtcaattaaagccagtactggcgcggcttgcagcgatgtttactcctttggtggtgctttttttgtcgacgtttattgatctaactcacgaaaaatacttcggcctgtagaaattggtgtgataactttgtcagcattagagtcaatcatctgatgggctccttgatggggcgaagaggacacgacaatgacaccgtttatgaccgaagattttctgcttgataccgagtttgcccgccgcctgtaccacgattacgccaaagatcagccgattttcgactaccactgccaccttccgccgcagcaggttgccgaaaattatcgttttaagaacctgtatgacatctggctgaaaggcgaccattacaaatggcgcgcgatgcgtaccaacggcgtggcggagcgcctgtgtaccggcgatgctgccgatcgcgagaaatttgacgcctgggcggcaaccgttcctcataccatcggtaacccgctataccactggacgcatttagagctgcgccgtccttttggtattacaggtaagttgttgtcgccagccacggcggatgaaatctggaaccagtgtaatgagttgctggctcaggagtcgttctccgcccgtggaatcatgaagcagatgaatgtgaagatggtggggacgaccgacgatccgattgattcactggagcatcatgcggcggtcgccaaagatagtacttttgatatcaaggtattgccgagctggcgcccggataaagcgttcaacatcgagcaggccacttttaacgattacatgagcaagcttggcgaagtctccgataccgaaattcgccgttttgccgatctgcaaagcgcgctgactaagcgtctggatcactttgccgctcacggctgtaaagtttccgaccacgcgctggatgtggtgctgttcgctgaagcgagcgataacgaactggatagcatcctggcgcgccgtctggcgggcgaaacgctcagcgagcatgaagtcgcgcagttcaaaacggcggtactggtgttcctcggtgcggaatacgcgcgccgcggctgggtacagcagtaccacatcggcgcgctgcgtaataacaacctgcgtcagttcaaactgttagggccggatgttggcttcgactccatcaacgaccgtccgatggccgaagagttatcgaagctgctgagcaagcagaacgaagaaaacctgctgccgaaaactattctgtactgcctgaacccacgcgataacgaagtgctgggcactatgatcggtaacttccagggcgaaggcatgccgggcaagatgcagttcggttccggctggtggttcaacgatcagaaagacggcatggaacgtcagatgacccaactggcgcagcttggcctgttgagccgctttgtcggcatgctgaccgacagccgcagcttcctctcctacacccgccacgaatacttccgccgtattctgtgccagatgatcggccgctgggtggctgctggcgaagcgcctgcggatatcgcgctgctgggcgagatggtgaaaaacatctgctttaacaatgcgcgtgattacttcgccattgaattgaactaaggccagaggtcggttgatatgcaatacatcaaaatccattcgcaggataacgtcgcggtggcgctggcggatatgacgtcaggcagcgtggtgacgattgataacgataccgtcacccttagccaggatgttgtccgcggtcataagttcgcgctgcgggccattgcgaaaggtgaaaacgtcattaagtacgggttgccgattggtcatgcgctggcggatatcgcgccgggcgagcatgttcatgcgcacaatacgcgtaccaatctgagcgatcttgacgcgtatcgctatcaaccagaccgggttgaacaaccggcgcaacctgcggatcgcgacgtcgagatttatcgtcgcgccagcggtgaagtcggcgtgcgtaacgaattatggatcctgccgaccgtgggctgtgttaacggcatcgcccggcagatccagaatcgtttcctgaaagagaccaacgacgcggaaggcaccgacggcgtcttccttttcagccacacctacggctgctcgcagttgggagatgaccatatcaacacccgtaccatgctgcaaaacatggtccgccacccgaatgccggggcggtgttggtgattggtcttggctgcgagaacaaccaggttgatgccttccgtgaaacgctgggggattttgacccggaacgcgtgcacttcatgatttgccaacatcaggaagatgaagtggaagcgggaattgagcatcttcatcagctctatgaagtgatgcgccatgataaacgcgaagcgggtaaactgagcgaactgaagtttggccttgagtgtggcggctcggacggcctgtccggcattaccgctaacccaatgctggggcgtttttctgactacctgattgcgaacggcggcactacggtgttgaccgaagtgccggaaatgttcggcgctgagcaactactgatgagccactgtcgcgacgaagagactttcggcaaactggtcaccatggtcaatgattttaaacagtattttatcgcccacgaccagcctatctacgagaacccgtcgccgggtaacaaagcgggcggtatcacgacgctggaagataagtcgcttggctgcacgcagaaagcgggttccagccaggtggttgacgttctgcgctacggtgaacgtttgaaagtccacgggttgaatctgttgagcgcgccgggtaacgacgcggtggcgaccagcgcgctggcgggcgccggctgccatatggtgctgttcagtaccggccgcggcaccccttatggcggtttcgttccgacggtaaaaatcgctaccaacagcgagctggcggcgaagaaaaagcactggattgatttcgatgccgggcagttaattcacgggaaagcgatgccgcaggtgttggaggagtttgtcgatctgatcgtcgatatcgccaacggcaagcagacctgcaacgaacgcaatgatttccgcgaactggcaatctttaaaagcggcgtcacgctgtaacgacggtgactaccgcggtgtttgaaaggtcggataagcatagcgccatccgacaacattaaactccccccggtcgcgcttacgcttaccggggctaccaactgaataggtccgtagatactgttatcgatttgcaactgttttggtccgggaaaaacagttgttttttattatttcagagcagattgcgctcccgatatttcttctgcgttatgtccctcatggcgcagggagcgcacaaagggcggccagtcgccgccgccctctgtactcccgggctctggccgccaaaatcgccacttcgtggtaccttcgacttatcccggcaggcttcgggtcgggccgaggcagcgtccctgcaaatcacggccctcagcccgcatccatgcgggctgccccggccttccgggaacgtctcagcgattttgaggccaccaacactggcagtttcagccagcatggtgaataaattaaaggcaggccgcacgtaccgtaggtcggataagcgtagcgccatccgacaatacgctaactacgcagggcgttcttcgccagctgttcgtcttcggccatacaggccgcggcggtgaacagcgcatcggttgacgagttgagcgccgtttcgcaggaatcctgcagcacgccgataataaagccgacggcgacaacctgcatggcgacatcgttcggaataccgaacatgttacaggccagcgggatcagcagcagcgaaccgcctgccaccccggaagcgccgcaggcgcacagcgaggccactacgctcagcagcagcgccgtcggtagatccaccggaatattcaacgtatgtaccgccgccagcgtcagcacggtgatagtaatcgccgcgcccgccatattgatggtcgcccccagcggaatagataccgaataggtatcgcgatccagattcagcttctcgcacagcgccatattcaccggaatgttggcggcggagctgcgggtaaagaaggcgtagacgccgctttcacgcaggcaggtcagcaccagcggatacgggttacggcggattttccagaataccagcagcgggttaatcaccagcgccaccagtagcatgcagccgaccagcaccagcagcaactgggcgtagccccacagggtatcgaaaccggtcgtcgccagcgttgaggagaccaggccaaaaatacccagcggcgcaaagcggatcaccagcttgacgataaaggtcaccgcgtgcgaaacgtcgttaatcaggtttttagtgctgtcgttaccgtggcgcagcgcgaagcccagccccaccgcccacaccagaataccgatatagttggcgttcagcagcgcgtcgatagggttagccaccatgctcatcagcagtccgcgtagcacctctacaatccccgacggcggggtgatgctgtccgccgcgctggtcagatgcagcgtagaagggaaaacaaagctaaacagcaccgcggtgagcgccgcgctgaaggtccccagcagatagagaaacagaatcgggcggatactggttttttgtccgtgctgatggtttgcgatcgacgccatcaccagcattaataccagcaccggcgcgacggctttcagcgcgccgacgaacagcgttcccagcagcccgaccgcgatagcggccggtttcgagaccagcgccagtaccacgccaagtaccagtcccaacaggatttgtttcaccagactgccctgcgccaggcgctgcagcagccccgacgggcgggtttgtgttgtcataaatcattccttccagtgatgtagcagtccatcccggcgacgtattatttgttacgtttatgtccggatgtaaatgaatgtttgcatggtcgagtatacggaaagaacgcgaggtgggaagcgtattctactgtttcttgcacgccgttcttattttttaactatatattaacgtttttgtgacatggataaaaattatgcgcgggaaagctaacgcagggcggcgtatcccggccagatacgcgatatctggccgggaacagggggttattgcagctgtttcttcttatcgttctgtttgttcaccctggcgttaatcagcagcgtcgccgccaggataccgcccaccacgccgagggaaacggcgatcggaatgtggtagaaatcgacgattagcatcttgataccgataaacaccaggatcaccgacagaccatatttcagcatcgagaagcgttcggccacgcccgccaacaggaagtacatcgcacgcaggccgagaatcgcaaacaggttagaggtcagcacgataaacgggtcggtggtcaccgcgaaaattgccgggatgctatcaaccgcgaaaatcacgtcgctcagctcaaccaggatcagcaccagcagcagcggcgtggcgaacagtacgccatttttacgggtgaagaagcgctcgctctcgattttatccgtcatccgcagatggctgcggatccaacgcaccagcggcttatcgccgatcccggaatcatcttctttcgccagcgccattttcaccccggtaaacagcaggaacgcgccgaacacgtacagtagccattcgaactgcgaaatcagccagctgccggtgaagatcataatggtacgcaggacaatcgccccgaggacgccatacaccagtacccggcgctgtagcgctggcggcacggcaaagtagctaaagagcattagccagacgaagacgttatcgaccgccagtgatttttcgatcagataaccggtgaggaaggctaacgcctgcggatcggcgacggcgcggccctgcgtttgcaccaaataccaccagaaagcggcgttaaacagcagggagagggtgacccacaggatggaccaaccggcggcctgcttcatggtcatggtatgcgcaccgcgccttccctgaagcagtaaatcgatcgccagcatgatggccacgactacagcgaatccgccccataacaacggcgtgccgacactattcattgcgttattccttacataaaaacaaaacggctgtcgtcgaaagacggcagccgctgcgcttttatgcatagacctcgccttccggcaaggtctcacttacaacaagagcggacatggatccttgatcttgttgcccggcgaccggatgcggttttgcacgcatcgtaatgacgatcgaccggccaggaagttactcccctttgcacgtaacaaagtattacaagttataaagggcgtcaatggaggtcgagggcccatttacactcctttactccacaggctgagtatccgccgggaagaccacgccggtctggcgacggatttcgctaagcagttttgccgtaatgcggctgacctcaagcccgggatgatcgacatcgttggcttccaccagccgcgcgaacgcttccgcttcatacagcatagtattgatgtgctgaggctgggtgagatcctgcgcttttccgccgcgtggaataaaggccaccttctgacattcggagattttctcaatcaccagcgcgccctcttcgccctggatttcgctagggatagtggagtcgctgaccttcgagtggtgcagggtgacatcgaaatcgccgtaactcagcactaccgtgccctggccatcaacaccgcttgccagcaggctggcgctggcatggaccgcttgcggttcgccccacagcgcgaccgccgaggcgaggcagtaaaaaccgatatccataatcgagccattggaaaaggccgggttgaaagtattcgggttttcgccgtcgagatagcgctgataacgcgaagagtactgacagtagttgatgaaggctttacgtaatttgcccactttatcgagcgcttcgcgcagcagcaggaagttgggcaggctggcggttttgaaggcttcaaacagcaccacgttgttttctttagccacggcaatcgccgcttcaacctcttgcaggttcgatgccagcggcttttcgcaaatcacgtgctttttatggctcaggaacaggcgggtttgcgggaagtgtagcgagttcgggctggcaatatagaccgcgtcaacgtcagggctctgcgccagttcatcgagcgaggtaaacagatgctcgaccgggtagtcattagcgaaagcttgcgcctgttcaaggctgcgggaataaatcgcggtgagtttaaatttaccggtttcatgggcggcatcgacaaactgcttagtaatccagtttgtgccaacaactgcgaaacgtatcataaacgttgacgaactccgttaaagggaacctttcgtcactctagcacgccatgatgacaaaacgagtgcgctatcacgcagaacggtttaacgaaaggtgcgtcagccacaggcgggtatcgaactctaactggtgatactgcggctccatatgacagcacagctgatagaaggctttgttgtgatccttctcttttaagtgcgccagttcatgaaccacgatcatgcgcagaaacgcttccggcgcgtcgcgaaacaccgtcgctacgcggatttccgctttggctttcagtttgcctccctgaacgcgggaaatggcggtatgcagaccaagcgcgttcttcagcacgtggattttactgtcgtacatcaccttattgattggcgccgccccgcgcagatagcgggccttcagatcctgggtgtattgatataacgccttatcgctgttgacatcgtgcccctgcggatagcgcttttgcagtacctcgccgagacggtcttgctcgattaaggtggtcacctgcgacagcagcgattcggggtagccctgaaggtaaggtagcgtgttcatggtgaaaaaagtttacttctccggagaattgagcgataacacgcgcgaattttagcatttcggaggggcgatgagccaggtagagttaaacggtgagttattcacattagagcggttcccacctaacgctgaagaagaagcgcttcaggcatgggaagcggcggatgaatatctgctgcaacaggtgaatgacgtcgacggcctgacgctcatcttcaacgacggcttcggcgcgctctcctgcgcgttggcggagcgcaacccggtcagcatcaacgactcctttatttccgagctggcgacccgccacaacctgcggatgaacggtatcgatgaagagagcgtgcgctttcaggatagcctgagcccgctgccggccgcgccggcgctggtgctgattaaggtgccaaaacagctggcgctgctggaacagcaactgcgcgcgctgcgcgaagtggtgacgccggagacccgcattatcgccgcggcgaaagcccgagatgtgcacaactcgacgctggcgctgtttgaaaaaatcctcggcactaccaccacctcgctggcgtggaaaaaagcgcgtctgatccactgcgttttcacggcccccaagcttgccgatgcgccgcaaacctacagctggaagctggacggtacgccgtggaccatccataaccacgccaacgtttttgcccgcagcggcctggacatcggcgcgcgtttcttccttcagcacttaccgtctgatttagaaggcgagatcgccgatctcggctgcggcaatggggtgattggcctgcaggcgctggcgcaaaatccaaacgccagcgtgatgttcaccgatgagtcgcacatggcggtggcttccagccgtttgaacgtcgagcgcaacctgccggacgatatcgcacgctgtgaatttatggtcaacaactcgctctccggcattgagcccgaccgctttacggcgattctgtgtaatccgccgttccatcagcaacacgctattaccgaccatatcgcctggcagatgtttaacgatgcccgccgcagcctgaaatatggcggcgagctgtacgtcgtcggcaaccgccacctcgattacttccgtaagctgaagcgcgcttttggtaattgcacgacgattgcgacgaacaataagtttgtcattttgaaagcaaccaaggtgcgtaaacagcgctgatgcatgtcgctgtttcccccggcttgcggctggcgccttagccgggctaccgttcggtattatcgtggtagcccggggaaggcgcatcgcgccgcccccgggacacggctaaatcgccagcgccagttttgtgccctgggcaatcgcccgacgcgcatccagctccgccgccacgtcgcaaccgccgatgagatgcaccgttttccccgccgcgcgcagcggatccgccagctcgcggcgtggttcctggccggcgcagatcaccacctgatcgaccgccaacagttggcgctcgccgccgatagtgacatgtaacccttcatcatcgatcttttcatagctgaccgccgggatcattttcacgccgcgcgccagcagcgtcgcgcggtggatccaaccggtggttttgccgagcccttcgcccggtttgctggctttgcgctgtagcatcacaatctgtcgcgggcttttactcagctgtgggccttcagcactcagccctcccgccgtttgcaggctggtatcgataccccattcgcggcagaactcgccgatatcctggctggtggccgcgcccgactggcttaaatacatcgcggtgtcgaagccgatgccgccgcagccgataatcgccaccttcgcgccaaccggcgctttatcgcgcaagacatcaaggtagctcagcactttgggatgatcgatcccgtcgatctccggcaggcgcggggcgatgccggtggcgaggatcgtctcatcgaacgccagcagatcgtctgtcgtgacgcgggtgttcaggcgtagatcgacaccatgaagatcgagcatggtgcggtagtaacgcaacgtctcgtgaaactcctctttgccggggatctgtttggcgatattaaactggccgccgatctccgggagcgcatcgaacaacgtgacatgatgaccgcgggcggcggcgttaacggagaaggccagaccggccggcccggcgccgacgaccgccagccgtttaggcgcgttggcaggcaggaccggcatcagggtttcatgacaggcgcgcgggttgaccagacaagaggtgactttgccggcgaagatccgatcgagacacgcctggttgcaaccgatgcaggtattgatctccctggcgcgatcgcgctgcgctttcgacataaattcggcgtcggcgaggaacgggcgggccatcgataccatatcggcatcgccgcgggcgagaatatcctccgcgacctgcgggtcgttgatgcggttggtggtaatcagcgggatcgacaccacgcctttcagcttgcgggtgacccagctgaaagctccgcgcggtaccggcgtggcgatggtcggaatgcgcgcttcgtgccagccaatcccggtgttgataattgtcgcccccgccgcttcaatcgctttggccagttcggtgacttccgccagcgtgctgccgtcgttgaccagatcgagcatcgacaggcggtagatgataatgaaatcgtgaccggcgcgctggcgtaccgccttaaccacctctacggcgaaacgcatgcgcctgacataatcgccgccccattggtcgtcgcgctggttggtgcgcgcggcgagaaattcgttaatcagatagccctcagagcccatcacttcgacgccgtcatatcccgcttcacgcgccagttgggcgcagtgggcaaaatcatcgatcagcgtcaggatctcatcgtggctcagttcatggggtgtaaaacggttaatcggcgcctgtagcgccgaaggggccactagcgcgggctggtagctgtagcgcccggtgtgcaggatctgcagggcgattttgccgccttcctgatgtaccgcgtcggtaatatggcgatggtgcgccagatggctggcatcgttgagtaccgcgccgccggccatggtgacgccagagggagccggagcgatgccgccggtgacgatcagcgccacgccgtgacgggcgcgttcggcgtaaaaggccgccagccgctgcgcgccgtccggcagctcttccagcccggtgtgcattgagcccatcaacacgcggtttttgagcgttgtgaagcccagctcaagcggggcgaaaagcgacggatagcggctcatagtggcttccaatgtaaaattattgttatgtggtcggatgagttactaatttagccgtcgcggagaaaaagggaaaaggggagtgcggtgattgtgatgggattcaaagaacggaactcgttgtccctcaccccggccctctcccaaagggagagggggaaaggcggatcggtaccggtggttagggtgacggggaagacgctacgcgctggcggcgctccaggcccggtgcctgccacatcgatgttgtcagcccgctatcgacaaggccaagctgatcggcgtacaccgtctgccacttgctcatcatctcctgatacagctcgcgatgctgcggatttggggtgaactcgcggtgccagctcactaaccgttctcctgtactggccatatcgccatacagtccggcgccggttccggcggcgatggcgcagcccagagcagtggcttcgcggaccaccggcacccgcaccggcaggccggtgacgtcgctgaggatctggctccacagcgcgcctttagagccgccgccggcaaacaccaggctctcgaatgtcacgccggagaactgcgaaatctgcgccaggttgcaggcggagacaatcgccgcgttctcctccaacgcgcggaacagggtcgctttgttgcacttctccggatcgatggagaggttaataaacgacggcgcggcgtggtaccactgcttaaagtgcatagcgtcggaaaaaataggcatcacgccatgggaaccggctggcacgcggctggccatctcttccagtagtgaataggcatcaacgccgagccgctcggcaatcagtttttcttcagcgcagaaggcgtcgcggaaccagcgcatggtcagtccggtaaagaagctgatcgattccgcctgcgccatgccgggaatgacatgaggattaacacgaatattcatctgcggatcggtacgcacctgcggcaggttgaccacctgctgccagaaggtgccgccgagtaccgcggtttgcccggcacgcaccaccccaaggcccaggcagccgagctggacgtcgccaccgcccatcaccaccggtgtcccggcgcgcaggccgctctgctgcgccgccgcttcggtgacggcgcccagcagggtaccggtctctttgaccggcgacagcatatcggcgcgcagtccggccatatccagcagcgccggacgccagtcgcggctgaacagatcgagcatgccggtggtgccggcgtttgacgggtcgaccgccagctcgccggatagcttcgccgccagccagtcgctgatcatggtgatggttgccgctttgcggtagatatcggggcggtggtgcgccagccacagcaggcgcggcatggcgctaagcgccagggtttgtcccgagacctcgtatacctcggattcaaaacgatagtcgtggatctccttaagctccgccacttcgcggctggcgcgggcatcgacgttggcgcaggcccagatggcctcgccgtcgcggtcatagaggacgatcccttcgcgcatcgaacagcaggcgacggactgaatatcggcggcagagagccgggcggcatcgagcgcctggcgaatgcactggcaggccagctgccagttggtggtaaggtcgaactccatcgagccggggacgttatcgacgctcaggtgtttccattcggcctggcctaccgccaactggcggccattaagatcgaaaatgaccgcccgaatgctgccggtcccggcatctaacgctaacaggtaactcatgacatgcgcctcgctgttgtcgcgcggcgccaggccgtcaggaggccagtgcgagcaccgcgcgtgctgttgtctcttccgttaccaggccattaatgcgcttgccaatcagagcggcatgaatcgcctgcgctttttgttctcccccggcgacgccgacgatggttggcagctgcgccagctcatcaagggttacgccgagcagttcccgatggatctccagtccttctaccggccggccgtcggcctgcaggaaataacctaaaatgtcgccgaccgcgcctttgcgcgcgtacatcagctgttcgccctcgctgatatagccggagcgtaaaatggtggcgtcgcgccgctgatcgatggcgccaatgccaaccaccgccgcgtccgccgccgtcgccgccagcatcacgtcgcgcacgctcgactcgcggcgcaggatctcggcgacctccgccgaagagacccgcagcggcgccggaataatgctgacgctgcaggcggcatcaagctggccgatgccggtcatataggggccgacgccgccggagagggtcaccagccgcacctgctgcgagccgataaagccgctgagatgctgcaggcagctcatggtggcttcgccgaaaccgactgccaataattgccccggttgcagaatgcccatcagcgactgcgccgcgccgatacccagccgggtattcatcggcggggtgttgagcgccggcagcacgcgggcaatcttgaggccaaaacgctgctggagttcactttccagcgccagacagccctcatagcgcgagttgatctgcacgcggatcaccccggactggcggcctttctccagcaggcgagaaatcttcagccgcggcagccccaaacgctcgccgatgtcattttgcgtcaggccgtcgtggtagtagcaccacgccacccgcgccaccagctcttcctcggctaacgccagcccggcgtagcggttctcttccgtaatgcgtttttcgctcataaattgaactcttataaaaatttagatcatatgttcgctattgcgtgatcggaaagtgtgagccgactggcaaaacggatctttcatcgctggcccattttttcctgatgatctaaagcaccaaagtgtgatcttcgcacggttgtaaatatagttcaccgtctacgcttttgaacattattaaatttaaaaatcatttgttcaatcgaggcgcgatgatgaagccactgcttgaagctcgccagatttgcaaacagttctccggcgttgcggtgctcaagggcattgatttcacgctaggcgcgggccaggtgcatgcgctgatgggcggcaacggcgcgggtaaatcgacgctgatgaagatcatcgccggcgtcgaaacgccggatagcggtgaactgacgatcggcgaacgcgcgtttgcgcgcctcaatccagcgctggctcatcagttaggcatctatttggtgccgcaggagccgatgctgtttcccaacctcagcgtgcgcgagaacattcttttccgcctgccgaagcgggcggataccgtcgcgcggttgcaggacaaactgcagcagttgaactgccagatcaacctcgacgccagcgccagcacgctcgaggtagccgatcaacagatggtcgagatcctgcgcgggctgatgcgcgaggccaggatcctgatcctggatgaacccaccgcctctttaacgccgggtgaaaccgagaggctctttagccagatccgcgcgttacaggcgctggacgttgggatcgtctttatctcacacaaattgcccgaaatccgccagcttgccagccatatttcggtgatgcgcgacggcgcggtggtgctgagcggcgagaccgcggcataccgcgatgagcaactgattaacgcgatgacgccggtcagccgcgatcatgcgctgagcgacacgcaaaagctgtggctgtcgctaccgggcaaccgccgtacgcaaccgcaggactttcccgtgctgcgggtggaagatcttaccggcgaaggctttatcgatctcaatctggagatccgcgccggagagatcgtcggtctggccgggttggtgggatccgggcgcaccgaatttgctgaaaccttatacggcctgcgtacaccgcgcgccgggcggatctggctggagaaccgcgagattagctgcgacagcacccgcgccaggttggccagcgggctggtctatctgccggaagaccgccaggtctcggggctgtttctcgatgcgccagtgcgctggaacacggtgatgttcaatcagccgtcgtggtggcagcaggggaaacgggaggcggcggtggttgaacgctatcaccgggcgctggggatcaagctggccgatggcgatcagccggtgcgcactctctctggcggcaaccagcaaaaagtgctgctggcgcgctgtctggaagctaatccgttactgctgattgtcgatgagccgacgcgcggcgtggatgtctccgcccgcgccgatatctatcaactgctaaaaagcgttgccgcgcaaaacgtggcggtgctgatgatctcttccgatgtggatgagttcgtcggccttgccgaccgggtgctggtgatgcatcagggccgctacagcggcgagctggcgcggcaggcggtgaccgtcgatcgcatgatgaccctggccttcggaggacaggcatgaaaacgttactgaagaatcgcgaactgagcgccttctttgccatcgtggcgctctttgtcgtgctggtggcgctcaatccagcctatttcagcctgcagaccctggcgatgattttcgccagctcgcagatcctctgcctgctggcattgggcgcgacgctggtgatgctgacccgcaatattgacgtgtcggtaggttcgaccgttgggctgtgcgccatcgccgtcggcgtggcgctgaactacggttacgggctggcgacggctatcgccttcgcgctggcgattggcgcgctggccggagcttttaacggcctgctggtggtggggctgcgcatcccggcgatcgtcgcgacgctcggtacgctggggttgtatcgcggggtgatgttgctgtggaccggtgggaaatggatcgagggtttgcccgacagcctgaaatcgctctcggagcccgcgtttatcggcgtgtcgccgctgggctggctggtgctggcgctgctgctggcaggcggctggctgttgtcgcgcaccgcattcggtcgtgatttttacgccgttggcgataacctcgccgccgcgcgtcagctgggcgtggcggtcaaccgcacgcggatgctagcctttactctcaacggtatgctggcggcctgcgccgggatcgtcttcgccgcgcagattggttttgtgcctaatcagaccggcagcggcctggagatgaaagccatcgccgcctgcgtgctgggcgggatctcgctgctcggcggtaccggcacgttgcttggcgcgtttctcggcgcctttttcctcacccaaattgacaccgtactggtgctgttccgccttcccgcctggtggaatgactttatcgccggcctggtgctgctcggcgtgctggtgctcgatggccgcctgcgccaggcgctggcccgccatcagcgggcgctgaagtacagccgtttccagccaggtaacaaaggaagcaaacaggttgcccgctttcccgaacgcaaaagcaaagaggtggcttaaatgaagctgaagcttaactgggaaagcgcgctgctggcgttgctgatcgcggaaatcctgctattcggcgctttgaatccgcgcatgctggatatcaatatgctgctctttagcaccagcgactttatctgcatcggcatcgtcgcgctgccgctgacgctggtcatcatcagcggcgggatcgatatttcgctgggctcgaccatcggcctgtgcgccatcgccctcggggtgatgacccaggcgggctggccgctgtggctcgcggtatcgctgacgttgctcttggggctgctgtgtgggttattcaacgccgcgctgattcactacaccggcatcagcccgctggtgatcacgcttggtacgctatatctgtatggcggcggcgcgctgttgctttccgggatggccggcgcgaccggttacgaggggattggcggttttcccgatagcttcaccgccttcgccaatttaaccctcgccggactgccgctgccgctggtgctattcgcgattatcacctttttcttctggctactggcccatcgcgggcgctttggccgccacctctttttactcgggcaaaacccgcgcgccgcgcgctatgccgcgctgtcggtgaacggcatcccgtacgtgctgtatggcctggttggcgtcgcctcggcggtcgcggcgctggtgatggtctcctatttcggctcggcgcgttcggatttaggccgcgacctgctgatgccggcgctgaccgcggcggtgctcggcggggccaatatttacggcggctcgggatcgatactgggtaccgcgctggcggcattgctggtggggtatctgcaacagggtttacagatggtcggcatccccaaccaggtgtcgagcgcgctgtcaggggcgctgttggttgtggtggtgatggggcgttcgctgagcctgcaccgtgaatgggtgcgcgcgacctggcggcgtcttttctcgcataaaacaatcggagcataaaatgaaattaaaactgatcgtcctggcgctggcgatgagcgtagtcaccgcacaggcggcggaccgcatcgcctttattcctaagctggtcggcgtcggcttctttaccagcggcggcaacggcgcgaaagaggcggggaaagcgctgggcgtggatgtcacctatgacggtcccaccgagcccagcgtctccggccaggtgcagcttatcaacaactttgtcaaccagggctacaacgcgattatcgtctccgccgtctcgccggatggcctgtgtccggcgctgaagcgggcgatgcagcgcggggtgaaagtcctgacctgggattccgataccaagccggagtgccgcagcatctatatcaaccagggcacgccgcagcagctcggcggcctgctggtcgagatggcggaaaagcaggtcagcaaacctgccgccaaagtcgcgtttttctactccagcccgacggtgaccgaccagaaccagtgggtgaaggaagccaaagccaaaatcgaaaaagagcatccgcagtggcaaatcgtcaccacccagtttggctataacgatgccaccaaatcgctgcaaaccgccgaggggatcttaaaagcgtatccggatctcgacgccattatcgcgccggatgccaatgcgctgccggcggcggcgcaggcggcggagaacctcaagcgtcagggcgtggcgatcgtcggctttagtactccgaacgtgatgcgcccgtacgttgagcgcggcacggtgaaagcgttcggcctgtgggatgtggttcagcagggcaaaattgcggttaacgtcgccgatcgattgttgaaaaagggcgatcttaacgtcggcgacagcgttgaggtgaaagatatcggctcgctgaaggtcgaaccgaatagcgtgcagggctaccagtatgaggcgaagggcaacggtatcgtgctgctgccggagcgcgtggtgttcagcaaagagaacatcaacaactacgacttctgaaggaggaaaagatggctgatttagacgatatcaaagagggtaaggacttcggcatcgatcgcccgcagcagaatacgctgtataccctgaaaggctgtggttcactggattggggcatgcagtcacggctggcgcgcatctttaatccgcacagcaaccgcacggtgatgctggccttcgatcacggttacttccaggggccaacgaccgggcttgagcgtatcgacctgtcgattgcgccgctatttgccgacaccgacgtgctgatgtgtacccgcggcgtactgcgcagccaggtaccggcggccaccaataagccggtggtgctgcgcgcctccggcggcaattcgattttgagcgaactctccaacgaatgcgtggcggtggcgatggaagacgcgcttcgtctcaacgtttgcgcggtggcggcgcaggtctatatcggcagcgaatacgaacatcagtcgatcaataacatcatcaaactggtggatgccggcaatcgctacggtatgccggtactggcggttaccggcgtcggcaaagagatgacccgcgacgcgcgctacttctcgctggccagccggattgccgccgaaatgggggcgcagtttgtgaagacctatttcgttgaggaaggctttgaaaaagtgaccgccagctgtccggtgccgatcgttatcgccggcggtaaaaaactgccggagcatgaggcgctggagatgtgctggcgggcgatcgaccagggggcgtccggggtggatatggggcgcaatatcttccagtccagcgccccgcgcgcgatgctgaaggcggtgaaaaaggtggtgcatgagaatctgaacgcgcgcgaagcgtatcagttctggcaggaagaaaaacagggagagctgaaatgaacgtgacgctggtggagatcaatattaaacccgagcgggtggatgagtttctcgaggtgtttcgcgccaaccacgagggcgcgctgcgggaaccaggcaacctgcgctttgatgtcctgcaggatcccgaggtgaaaacccgcttttttatctacgaagcctataaagacgatgaggcggtgctggcgcataagaagacgccgcactatttagcctgcgtcgaaaagctggaggagatgatgtcgcagccgcggcagaagcgcagctttatcggcctgttaccgcagatgtgaggttccctctccctgtgggagagggttagggtgaggggaattactgcttacggaaaaactcgttatacaacatatataaatgcgccgcgctccatgagaagttaggcgccccctgctgggcgccggtcagcggattgtagttctcctgaatcgggccatcggcggttaagcctttggcgtgctggaagaaggcgtccgccagcttcagcgcctcatcgcgatgaccgtagcgctccattcccttcaggccgaaccagaactgatccacccacacccgtccgcgccagtaaatatcggcgccaaaggccgggttggtcagcgcggcggtacccagcggcacaaaggtgttgaactctttcgggtcgagcatcactgaaaccacatcgtcagcatgttgctgcgtcgccgcgccgttaaacagcggcgaccagccttccggccctttgccgcgctcgacgatcggtttaccggcgcagccgttggccagcggttgttcttcgatacgaatgtcgtaatagaagcgagtctgcgggtcgaacatgcaggtattgatataatccgccagcttcgccgccagcgcctgatagcgctttgcctcttccgctttgccaagaatggtcgccatctgcgccagatagtggttatcgctgtacatatagctggcctgatcgaccgattcctggagcagcgaataccccagcaggttgccgtcgcggtcacggttttcggcgaatttcaccgtccagtcgctgcgtttgccgccgttggtgacgtatttatccagctgttctttatcgataaaaccaaataccgccgcatcgtcgcgcccggactcccacgacgccgctacctgcgccggaatttcgaggctgtcgtaatcgcctttggccgtcacctgctcgtaggcgcgaaggccggaaagcgtctgctcggtttgcccttttttcacagtgaacagcatggcgccgtcggcggtgttgtgcgccttatcgcgggtcgcgccatattccggcacgccgttaccgttatggtcgcggttgcgtagccaccagtcgtgataggccaccagcttcggatacatctcttccagccacgctttatctttggtgacgttatatacctccatcaccgaccaggccgcgaggcttggcttggtgttgcgttcgttccagttgccgccgtcgccgccgcgctcggggctcaggttccaggcgatcagatcgggcacaaatccggcatcctgcgggcgcaccttatcattggcttttatctgccaggagaagacggcgcggatattctctttggcgatatccgggttgaagtgggccatggcgtaggcctgtttccaggtatcccacggccaggtctggttgccggagaaccagcggccggttacggatggggtgacggtatggtaatgcaccgcgccgcccggcgcgcgccagttgccgttgagcgtctcaatggctttcaccgccacgcgggtctgttcggcggtagcgtcggggttgctgagccctttttgcagataaccgtcccagcgctcttcggaggcggtgagatagtaagccggccgcgccagaatatcgcggatctgcgctttttcccgccgcgcttgctccgcagtgagtaggtgcgaataggtggtgtagagggtggtggagccgcggatctccgcgctgctggtaaagcggtggccgtcgatacgggtctcggttaccagcgaacggtggatctgatactgcgattcgccggaggtcatcaggtcggaggcggcgcgaaccttgccaaagctaaccgtcaggccgtcgggcgtggcgctcagacggcgctgatagtccgggaaggcttcatcaatggttttgtccgatagcgctttaccctctttggcggccagtttttccagcagttcgccatcccacaccagcttcagcggagtgttgctggtgattttggtctccagcagtgaagtgtgggcgctggcgaagcgcagcgtcatctccaccttcacgccgggggcggtcagcgtttgtttcagcgcgccgggcaggctccaggcctgcagggtgaaatcgacctttttgccgttctgatacaccgtcaggcgatcgaagttggtggccataaagttgatgtactcttcggtcagcagcgccgggccggggaagccgcccatggtcgccgggccgtcgggcagcaggtggccgtgccacgccccgaggtcgaaaaaggggttgaagcgctggtggtcgtcggcgtcgaaatcctgcatatactgcggcgcgccgctgcggtcgatgacgtttttaaacgcctgcgcggtgacggcgtgggcggaaaaactcagcatcagcgcgcaggccagcggcgtcagcgtagtggtgaggttcatggtatctcggctccttgttaccagtagaagtattgcatcaggaaaattttgtcgctcgggtcgccgctggtgttgcttgtgtaaaaacggctgtcggcggcggtggcgaaacgcccgccgccgtattcgtaccagatgccaaattgcataaacgcggtggtttcatcagcggcgtggtccgggcggtgtttggcgtagctgtatgcggtggagaagtagagcccgcttaaggcttcatacatggcgctggccataaagccggtttcactgccgggaacatccagccctttggcgcggccggtatggtgccaggcgcggaaggccagattgggcgacagaatgccggtcaggaatagctgcccggtgccgtcggtcacctcaaggccgttcatccaggtgacatctttgacgatgtcgtactgtacgtagccgttgatcatcgccggataggtgtacttatcgtcatagcgatcgtatttgccgaagtgcagccaggccttgctttcatcgtgatgcccggccggcgtggcggtgacgctatagcggaaatcgccgctgcggttttgtaccttcagcgcgtacatgatgtcgcgggtattggggatcacgtaacccagatcgggggtaaagtctccccaccactgcaggtcgtccagcgacgagtcctggcgcaggctgagcatgatctcggtgttgttatcggttttatagccgccatagaggcggttaaggccgccttccacgccgccccagctgtggcccggcgtccaggcattgccctggctatcggcctgtaccgtccaggcttcgccgtagatcagcccgaaccagtggccgtttttgacctccagcccgccctcgatataggtgccatcgctgtatttatgtttgtcctcgccttctaaatccatgtatccgccaacccctaactcgccgtaaaagcgataggaggtggtggttaattccggcgttttggtatcgtcgtgctcggccggatggacagtctcagcggccgccgcaggggcgcaaaaagccagggcaacgagtgccccgtataagtaagagttagttttcatttttttaaggtatttaagaggtatgggaagccggagccgcttctatttgttgttgttcctgggttaatcctttgacgtatctgctgtatttccaccacgcgaagccaaggaaaatcacgatcccgccgacgttgtagaaaatgatggtcaggatgttgccgccggttgggaaggttgaggcgacgaagccgatggcgaaaatcacaatcagcatggataccaccacgatgccggtagtacgcgagcccatgcggaaatcgcgcggcagatggtcgagcttgcggcgcaggttgaggtaggccagcatgatgaacagcggcggcagcatggaagcggcggcggtcatgttgatgatggtgttcatcagatcctgcacggtgttggatcccagcgtcgggataatcatcagcggaatgacgatcagatactggatccaggccgcgcgcgccgggacgccgttctcattgagctcgacggtttttttaccaaagatgccggaggggatttccgagaagaaaattttaaccggggtggcggtccacatcagcagcgagccaaacatcgcggtaaacgaaacgaggccgacgaagcggttcatcagaatttccggcaggccaaagtaagccgccaggccgtggaacacctgcaccgatccgccggtaaacttcagctctttactgctgacgaagacgttgatcagcacggaggagatcgagtacagcacgccgatgaagatcccggcgaggatgatcactttgacgaaggatttcgagccgcctttcacatcgttgacgtataccgccaccgattccgcgccgcccgccgccataaagatccacgtggtaataccaaggaacgcccagttgaagttagggatcatcgcctcgacggtgatcggatccgctggctgcacgccgcccaccagcgcggtaccggccagcaaaatataggagagcgtcagcagcagcatcagcgatgaggtaacggaggtgataggccccagcattttcgcgccgttggtggagatccaggtggagaaggcgaacagcgccatgctcagcacggtagtggcgaacggcgtcagaatgtattcgtagccgaggaaggcgtaagaggcataggcgatcacgcgcggcagcagcgaggtgaagaaaaacagatttacgaaccagtaggtataggcggttataaacgcccaacggccaccgagcgaactcttcacccaggcgtaaaccccggcctcggagtttttattcagtgacacgaactcggcgataatcaggcaaaacggaatgaagtagaatagggtagcgaggaagaacatcggcgccgacgccagccccagttcgatattgttgttgatgacgttattgaaactgtaaacggcggcaaaggtcagcgatagcaggccgaacttgccgatggtattacgtttagtatcagacataacacatctccacacattgtccttcagagggtcgctgaagggggttgtgttgtttatagggtagaggtagttaagaattaatgtcgattttagtaaaagttttagtaaatagaagtaaagaaaccgaatagctttaactcgatcacgaaaaaggttgagtaatacgtaatcaggcgagggataaaaaaatcccgccagtcgctgaggcgctgacgggacgacaggaacgttatttaccggcggcggcagcgttaaccggcgccgcggcgcgcagacgttgctgctttttttcaaagcgggtgatccaccaccacgccaggccggagaagaccgcggtcataaagacgttgataaagaaagcgttaaccagatcgacgcccggcgggaaggcggaagcggtcatgctaaccacgaaaatcactatcagcatcgataccacgctcatgcccactttccttgagcccatacggaagtcgcgcggcgtgtcatcgtgtttccagcggaagacgaagtaggcggccatgatgaacagcggcggcagcatggcggtgccggcggtgagattaatggcggtgttcatcatctgctgcacgctggcggaaccgaagccgttaacaatcaacatcaggaagacgaacaggaactgccaccaggcggcgcgtaccggcacgccgtgagcgttcaactcggtggttttctggccgtagatacctttcgggatttccgagaagtggattttgaccggcgcggcggtccacatcatcatgctgccgaagatggcgataaacagaatgatgccgacgaagcggcccatcagcgcttcagaaatgtggaagtaggcgccgagaccggtaaagatttccaccattccgccggcgtaggtcaggttttcacgggcaacaaagacgttaaccagcagcgaacctaaggcatacataccgccaatcagcaccccggcggtgatgatgactttaataaaggatttctgcccgcccttggtgtcgttgaggtaggcggcaacggtttccgcgccgcccgcggcctggaaaatccagcacatgataccgagcgtcgcccagttgatggtcggctccatcgccgccagggtaatcggctgcgccgggacatgaccggaacccagtgcggtcagcgcgccgacgacgtaaatcgcgaacaaagcgaacacgccgtaggccacgcattcggaaattttacccagccaggtcgcccctttggtggatatatgggtggccatggcgaacagcacgatggagataagcgaggtcaccatcggcgagaaggggatcgcgtacccggtgatcgcgtatgaggcgtaggccactacattcggcaacagcgagaggaaaaagaacaggttcacaaaccagtagaggaaggaaccaagataggcggcgcgggtacccagcggctgcttcagccacgcgtacatcccggattcggagtgtttgttggccgagacgaattcggcgatgataaacacgaacgggataaagtaaacgatagtggcgaataagaagataggcgcggaactgagacctaactcgatgttattattgacgatatttcgcacgttaaagacggcggtaaaggccatcgatagcagcgcgaacttaccgattttggcacgtacagactcggacatacgtcctccaatcattcatctacccgccttagcgggctggaaccgaaaggccaacgggcgtacccgttgacctcccttgtcgcttaacgcgggtttacttattgaggaagtatccgtcttcaaccgtgactcgcagcaccactttttttaccggcgcatcgcagataaagcggtaggcttcgtcgatatcgcaaatcaccatctgcccttcgtgaaccttcaccgtttcaccgatccctttcaggtactcgcgatcggtttcgtcgcggtagcaggccacggtttgcagattttctttggcggcaaactcgattttctgctgcccttgcaggtaatagtgcacctcaaagtagcggcggttaccgacaaatagcgcgtcggtcgtactatcggtttccacccgataggagagcgaatcgccaatggaatgcgccacgcccgggcggatgttgtcgatgttattgatggcttccacgcagcgctgccatttgcggccgctatgataaacctgcttaaactgttctaaattatcgagaattctcattgttcagcctcgctgtgtgcaacgggggaaaagaaaccggcgccgaagctatggttcgccagtacctgcgaggtgccgcatccgccctccagcggcagcagcgtaaagccatagttgaaggtgttgagccagacgcgccagctatccagcacttcgctgccccaggagttggagccgaggccgagtagttgcgcatcgatattcagggtgatgtcatcgctgcgctgcagttcgttgcagtgctgggcggcgtgcaggttttctgccgtaaagtgccacgcgctgacgttgagcggattgcgcggaacgaccagcagaccgctgccgtggcggtcgctgaacgatgcccagcgcacgtgctgacgattaccgttgttctgcgggaatggataattgacgaacatatcgtcgacggtggtatgccagatatcaatgatgttgctttgctggctgtcggcgtagttctcgcccggcccgcggccatagtagttcacctggtcgaactcaccgttaatgcccagcataaagccgatgcacgggacaatgtgtggatagtcgccgtagcgctcgccggccagctcaacgttgatgtggccctgcggggtaatctgccagcgataggtacagcgcataccgaagtcgaacaccggcggcgcaatcacgctgcgggtggtgatcaccaccgtttcgccctctatttcagcgctgaattcgcgcagatgctcctgcattatctgcaggtgggccggctgccacagtccttcgtattcctgtttatggttatcaatcatgggcttgaagaaattgaacttcggttcgcgggttaccaggtcgacgccgttgacctgccattcgctcagtttgccgctaaccttgctgaacaccacgcggaagttatggccgcagatggtgtagctgaggcgttcatcgacaatctgcagcggcgtggcgctggcgtttaacagcggggttcgcgcggcggttcgcgctttaagtgggaactgatagacggcgatatcgtgattggcttcgctatacggggtgcgcgaatctttggtcaccatgatgttgacgaaagcttcacgttcgtcgagctgcggcagggcgatttgcaggtcgcggccgctgttcggcgccaggtcttgcactttcagcagctgactggagagcgtttcgccttcggcgcgcacttcaacgcgcagggtgtagtcatcgagagtggagaaccacagtttgttttccacccgcagttcgccgcggcagatatcccgtgcctgtactttcaccggggcgatgacctgcttgtattcgcgcaggcccggccccggcgtctggtcggagaaaatcagcccatcgaggcagaagttgtagttgttcgggtagtcgccataatcgccgccgaatttgtaccacaccgcgccgttatcgtcgctggcctgaatcccgtggtcgcaccattcccacacgtagtggccctggatgcagtcatgctggtagaagacgttctggtattcggttaatccgccgggaccgttgcccatcgcatgggcgtattcgcagataatgcgcggtttttcatgtggatgttcgccaaattcgttcatcagcggcacgcgggtgtacatggtggagatgatatccaccacctcggcgtcgcgatcctcttcgtagtgcaccaaccgggtatcatccagcgctttggtggcgtggtacatggcgcggatgttgcagccatagccggattcgttacccagcgaccagatgacgatcgacggatggtttttctgcgcgtgaacgtggcgcacgatgcgctcaacgtagatatgttcccaggccggatcgtcggtgatggcgctgaggttgccgacgttggcgaaaccgtgggactccacgtcggtttccgccatcacgaacaatccgtagatatcgcacatttcatagaaacgcgggtcgttcggatagtgagcggtgcgcaccgagttgatgttgtgctgcttcatcaacagcagatctttttccacgcgatccatgccgaccgcgcggcctttcagatggtcgttatcgtggcggttcacgccgtgcagcattacgtagcggttgttgatgtagaacaagccgtcacgcactttgatatcgcggaaaccgacgcgctgcggaatgatttccagcacctcgccggcggcgttctttaacgtcagcaccagatgatagagatacgggctttccgccgaccactgctgcggcgcgctcacatcaattgtgaagccggtatttagctgctggctgacctgcagttgaccgacgttgcccgaataaagcgctttttcgccgtcgaacagggtatattccagcgttgccgccgccgtctgcggagccaggttttccagcgtcagctggcaggagagggtcgcgtcgatgtagtcatcgttaaaatcggtgcgcacggtgaaatcctgcacgtgcagcggatttttccccaccagatagacgtcgcggaaaatgcccgccgaccaccacatgtcctgatcttcaatataggtggagtccgcccactgcatcacgcgcacgcacagcaggttgtcgccggttttcaccgccgcgctgatatcgaactcggcggtcaggcggctgcctttgctaaagccgatgtactggccgttaacgtagacttcgaaataggtttcgacgccatcgaatttaatgatggtttgtttgccctgccagccgtcgccgagggtgaacaggcgctggtaggcgccggtcgggttatcggtcgggacatagggcacgtcgatggggaaggggaaaccttcgtcggtgtactgcagctggccgtggccttccatctgccacatgcccggtacggtaatcggcccccactcgttctgatagcatgaggtaaagctctccggtaccagcaacgggttggtgaagaagcggaagttccactgcccgctgagggacaggaagcggctactggtttcgcgggcgaaggtccgcgcctgggccagtgagtcgtaagagaagaaatacgcccgcggcggcagcctgttttcatgagtgagttgaaggttttcccagcgattcatatcgcctccctgaacggcttaataagataaaactcattttagtaaaacttttactaaataaaatcgccagggatgatttactttaactcgatcacaaaatgaaccgctttgagtcgggaagcggcttcgccttacccgacctacagaatggcgttccgggcaggagcggtagcccgaccaggcgcagcgccgccgggtaacaggatgcgggtagcggcttcgccttacccggcctacagaatggcgttccggccaggaccggtagcccggccaagcgcagcgccgccgggtaacaggatgcgggtagcggcttcgccttatccggcctacagagtggcgttccggccaggaccggtagcccggccaagcgcagcgccgccgggatggggttggattaacgggtggtgccgcgcagcttcaacacgctgggaacaaaaacgttaagcggcagggcgcggccatcgcgggccttctcgattagcaggttcaccccctggctgcccatcatttcggagtggatccgcaccgtcgacagcggcgggaaggtaaagcgcgcggtggggatatcgttgacgctaatcagcgaaatatcttccgggatcgccagcccgcgttcgtggatggcgcgcagcacgccgatggcgatggagtccgaggcgacaaacagcgcccgcggaaactccgcttgcgccagcatctgcttcgccagctcgtaaccggacgagctggaaaaaccgccgcgccagatatcatcggctgaaaccacgcccttcaactgaccgtactccacaaacgccacttcgcgaatatcggccttgccgggctggtcctggccgccgataaatccaatacgcgacgcgccctgctggataaagaagtcgaccacctctttagcgatacgtaccaggtcgatatccaccgcatcgtacgggctgccggcttcgtggaaatcaataaagcagatattgtcggtcagcgcactggcggtctcgcgcagctcgcgcgtcggctggccgataatcaatacgccggtgacctttttcagctcgggcagggtgttattgagatagcagttggtgagctcgatggcgagcttttcacactgggtttcaataccgtggcgaatggcgagatagtaagggtcgttaatttccagctcttgctggtagctgtacagcgccaggatatgatggtggccgacgggtaggacctgcgttttacgcgcgctgctgcttttatattcaagcttctccgcaatctcgagaatgcgatgcttggtctcttctttcacgttcagggtgggatcgtcgtttaacacccgggaaaccgtcgccagcgaaacacccgcttcggtcgcaatgtcttttagcgttgccatctttttcctttatcggacgttgcccatgtttgctcatccattgtaaagcaagcgtcgcgtcctgcaccttatttcagtaaaaaacgcctgcgcgcgagggctgttttccccggcgatagcgtgacagaagtagcattattctcagcattatgcagacgaacggcaaaaacttgctatcttttagtaaaaagttactggaggtgagagatggataccgtagcttacgctgattttgccaaactggagatgcgcgtcggcaagattgtcgaggtgaagcgccatgacaatgctgacaaactgtacattgcgcggattgatgtcggcgaccgcacgctgcagacggtcaccagcctggtgccctactacagcgaagaggagctgctggggaaaacggtggtggtgctgtgtaatctggcgaaagccaaaatgcgtggtgaaacttctgagtgcatgctgttatgcgcggaaaccgaggatgaaagcgaaagcgtgctgttgacgccggagcgcgtcatgccggcaggcgtgcgggtggtataacgcgaaaataccctctcccggcgggagagggtcgggtgtgaattatgtctcttcgaccgaaacgcgcagtgccgccagcgccttgcgcgccgccttcagcacctgttcgcactgttcgagggtgagcgtcagcggcggttcaacgcggatcgtcttggcgttgtttaacgtcccggcgaccagcacccgctgtctgaacatctcgctggcaaagttatagccaatctcgttatcgacaaactcaatggccatcagcatgcctttcccacggacttcattcaccagatccggatattcgcgcgccagttgacggaagccgtccagcaacagatcgcctttttgctccgcctgcgccggcaggttctgcgagagcaagacgttgatcgtcgccagcgccgccgcgcaggccagcgggttgccgccgaaggtggtggtgtgcaggaatgggttatcgaacagcaccgagaagacctcttccgtcgccaccgtcgcgccgatcggcattacgccgccgccgagcgctttagccagacatagaatatccggctgcacgttttcatgctcgcaggcgaacatcttgccggtgcggcccatgccggtctgtacttcgtcgaggatcagcaacgcgccaaactcgtcgcacagtttacggaccgccggtaagtaacccgccggcggcaggatcacgccgccttcgccctggataggctcaatgatcaccgccgcgacgtcatcaccggttttcttgcattcgctcagaatggaacgcatggcgttgatatcgccgaacggcacgtggcggaagcccggcagcagcggcataaacggtttacggaaggtcgatttcgcggtggccgacagcgcacccagcgatttaccgtggaacgcgccgctggtggcgacgaaggtaaacttgccgcgcggagactgataggcttttgccagcttcagcgccgcttccaccgattccgtgccgctattgcagaagaaactgtatttgagcttgccgggcgttaaggccgccagcgttttcgccagcatcgcccgcagcgggtccagcagctcctggctgtgaagcggttgtttcgcgagttgattttcgacggcggataccacaactggattacggtgccctacattgaagatgccaaacccaccaaggcagtcgataaactcctgtccctgggtgtcgacaagcgtatttaaccctcccgcttgccactctacggctccgtaatccccgccggctgtgaccgattttctatactccagaaaccccgggttcacatgttctttaaagtattctctcacctcctggttcagtgctttcatttcgtcatgggagagcgattgcttctcgatgagattcagtgcgtgcgcgctgcaggccagagccgatgcgctggaaggtaacctgttcaaaatgtgctcctgggggggcgtatcacatgatactgaattaagtattgcagggattacgccagcctggcagcgacgatgaaaatcgggataaacgcaaagttaaggtgcaaatgtgcaaaatttaatctcataacttaattattggcacgttttattcctgaggctgcaagataaactgccgttggggtgtgaagcggtatgaattggggtggtgcaggctgccgcgtgatggagcagcctgggaactattgtggtgcgagaggttaatcgagctgggagatttccatcgccgcgcggtcaatcacgccgatgatctgtttcaattgagcgtcgctgatgctctgctggttgaccttcaggtccagcaccgctttaaagttctccagcgcgcgtttcatctgcggatttttgcgcaattcgcagccgaccatgcgttcctgcaggcgcgtctgaatttggcttaacagctcgccgctttcggcgcgcaggcggcgcccctcttcagtgatagcgatttttttacgcccattctcctcttctacgctaatcaatccctgatcctgcagcaggtcgagcgtcggatagatgacgccggggctggggctgtaattgccctgcgtcagcgcctcaatctctttaatcagctcatagccgtggctggcgttgcgcgaaaggatatcgaggatcaccaggcgcaattcgccgtggccaaagaaacgctggcggcgtccgccgccgcgacggccctgttcgccgtggccctcttcgtgatgatgtcgcatcgatgcctcctgtatttttgatatatctaatttatatctaaaaaataataaatgacaacggtttatttttaattgactgatataattgaatttgtttttgattttggctttattgtgactttctctcgctttatatcaaaaaaaacttgccattttcactaatggcaatcattatcatttgcactgagtttagatatatctatttacccttcaccaaggcgacgacggatgaccacaattaaacaagcaaaatatccgcagcgcgtgcgtaacgaactacgttttcgcgaattaaccgtgctgcgcgttgagcgtatcggccaggcgttccagcggattgtgctgggcggcgaggcgctggatggctttgtttcccagggttttgacgaccacactaaactgtttttcccgcaggcgggcagcgtatttacgccgccggaagtgaccgacgaaggcattaactggggcgagggcgtgcgcccggcgacccgcgactacacgccgctgtacgatgccgaacgccacgagctggcttacgatttttatatccacgatggcggtattgccagccgctgggcgctggaagccaacgtcggcgataagctggtgatcggcgggccgcgcggttcgctggtggtgccggaagattacgcctggcagctttatgtctgtgacgagtcgggaatgccggcgctgcgccgccgcctgctgggattgcgccagctgccggtgacgccgcaggtgacggccatcgtctctattgcggatgcttcgtataaagactatctggcggatctcgacggctttaatatcgaatgggtggtaggccacaacccggcgttcgtcgccgagcgcctggcacaggttaagatgccgtcagaagattatttcatctggctgaccggtgaaggcgcggtggtgaaatcgctgctggcgcgctttgaggatccgagtatcgatcagcagctggtgcgttcgcaggcgtactggcacagtaaataatcggcagagtggtaaacccggatggcggcgcgttgcgccttatccgggctacctttcaatggtgttatatcgccccggtaagcgcagcgccaccgggtgaggcttagcgttcagccagcgccttaaacaccatcgccaccgcgtgagcgccggggtccatattgccgagcaggctctcgctgttgagataggaggcgcgcccggcgccggctttgctcgactggcaggtgcgatccgcgccggcctgcgccgcggcgaaagcggcctgcagattatccggttcggccaacagcgccgccagcgccggctgtagagcatcaatcatcgtccggtctccctcatcggcgccgccgtaaaatttcatctgccccagaccggcgttcagcgcttccgccatgctggcgccttgctccagcttctgcccggcggcggtgaagaaaatcgacatcaatacgccgcttgagccgcccatcaccaccgtcaggcgttcgccaattagcgcgaacagcgtgggtaaatcattgagcggcagttgctggcgttgcaatagagcggcaatctcacgcgcgccggcggcgaaagtggagccggtatcgccgtcgcccactttggcgtcaagcgcgttgagatgggtttcgaggccggagagggtgctggtcacctgcgccacgtaatcgcccacctgcgggttggccgatggcgtaaaggagacgcgtgcgctggcgagcgcggacggcataatattaacagcccgcggctgcaccggcttctgccaactggcggtttcgacatccgacagcagcgccttttcgatgctctcttccagcacgatagtggtcagcgagaagcctttcatatccagcgccgttaccagcgaagccgggccaatcaaccagtcaacgcgcgcatggagtggggtattggccagctcgcgggtcagaatcgccatctcggccaccgacacgccgccgagattattgagcatcaccgccaggcggccggtttcgggtaggacggcggtcagcttctctaccataatctgcatgatttccgcgctgttatgggtcgcgatcgtcgaagctcccggctcgccgtggatgcccattcccagctcggcgtggccgggctgatggcgcggcgcgctttccgcttcctgcggcaggtgacagctggccagcgccaccccgatgctggcggtatggttggcggcgtattgcgcttcacgcaggacggtggcgaggttgaagccgcgctcggcgaaatagcccgccaccttatgcaccagaatggtcccggcgatgccgcgcggctgtttgttatccggcagcgaaatatcgtcgccgacgatcagcatctccacgttgtagccaagacggcgcgctttctccgccgcgaggccgaagttaagccgatcgccggtgtagtttttaacgatcagcagacagcccgcctcgccggtcaccgcctgaatcgcggtgagtaccgcatcgacgctcggcgaggcgaacagatcgccgcagaccgcggcggtcagcatgcctttaccaataaagccgacgtgcgccggttcatggccggagccgccgccggaaatcaccgccacgttgtttttattcagatcgcggcgcaccactacacggatcgccgggtcgctctccaggcgggcgaggttgttccacgggctggcaataatggtaccctcgatcacgtcgttaacgaggctggcgcgctggttaaaaaagaattgagacatagtggttcctgatcagtaagcgaaaactcaccctccggaggcgggcctccggagtggtaacggtcaaagtggatttagcgacgaataaggcgttgctgacgcatatcgagcgtgatggcttcgccaggctgaatatcattcagcgcttcgccctgctggcatagccaggcgatccccgccgcacgggcgataatcgcgccgtgggcctgttcgctgccgtcgcgcaggcacaggccggtgacctggctggcatccagttggagtacggtcgagggataaatattgtcggcgataataatcgtcggctcactggcgaatggcagcgtctcctttataccctgcagatggcgcagcgtgcgctgcagaatatcgtcgacatcgatataacgggcctgcagataggcgtcatccagctgacgatactgctggctgagctccatcagcacctgatgccacgcccattccgccgagcactgttcggtgagcaggcgatcgttggcggcatcaaacagatcttcatcgtcgagcaaggtgtgatgaccggcgaagatcgccgcgatatcggcgttaaatttgttttccgccagctcggtgagcgcattgagatcggccagcgtctggtcgatcgcctggcgcaggcgctgctgctcgcgagcaacgtcggcggcggcggggagcgccggttggatcggcgccagcggataaagcagcgccgcgccttcaacacgcgcaggtatggcgggttccgctgtcggctgcgcctccggcgactcgccgaagttatcggcggctagcgcctgaaacgccgccagcgcggcatcggcgtccggaccgcgggccagcaggcgcagcttatcgtggcggcgcacctgcagcagagcgatttgattcagactgtccggggtgacgcatttgccgtttttctccagcaccaggtcggcgttaaaacccgccagcgcggcgaccagctttgatgccggacgcacgtgcaggccgttgtgattgttaataatgactgaaaccgatttagcatcgccgtcgtcagcaagcgttggggcggcggcgtcaggcgtgtgcgaaggtaaacccagctgaacccgcttggcttccagggcgttcatggcatcggcgataactttgtcgattccggcgccggaggcggcgctgacggtggccgccagcgtcccttcgaccagcggcgcggcgcacagccgcacttttgccgccatcgccggatcgagcagatcgagtgcggtttcggcgctgagcagggcgctgccgatatccatcatcaccagtacatggtcggtatcggcgacggattcgatcgcctccatgactttaatcggatcggtgccgatcgggttgtcgggatcgtcgatcccggcggcgatcgccagcttacagccatcgttcattaacatctgccgggccagttctccgacaccttcgcccagccgggcgctatgagaaacaataaccaggtttaccatcgcgatttccttactctttggcggcggcagccagcatctgaaccataaacagcaccgaggtcgcgccgggatcctgatgcccgatgctgcgctcgccgagatagctggcgcggcctttacgggcctgcatggtgatggtggcgtgggcggcgcgctcggccacttcgcaggcggcatccagcgcggcagggatagacagatgttgctcgctggaatgacgcagggattccaccaccggcagccagacgtcgcacatcgtcttatcgcccggctccgctttaccacggttgacgacgccgtccgcgccttcgcggatcatctgataaagctcgtcgagggtcaggctctgatgcgcctgggtgacctgggcggcgcggataaagaaggtgccgaacagcgggccgctggcgccgccgacgttggaaagcagcgtcatcccggtattcttgagaataaaaccgatgtctttatcggcgatcgacggcagcttttcgaccactttgctgaagccgcgatgcatattgaggccgtggtcggcgtcaccgatctctttatcaaggccggtgagaaaatcgctctgtttggtgaaaatatcgccgcagcggtacagccagtcgacgatttgcgttctgttcagtgacatgtcgtgctccttattttccccagttcagcgccggggtgtggaccggggcgtcccataacgccagcgtgtcatcatccgctttcagcagggtgatggagaaacccgccatatccagcgaggtgcagtagctgccgatgaggttgcgttcaatcacaatgccggaggcttcgcagcgctgggcgaggcggttgtaaacgccgtacagttcagaaagcggcgtggcgccgaggttattgaccagcgcgataacccgatcgccgttttgcagcgcggttttgctctgtttcacttcctgccacgctcccttgacgttatcccactggcgcagcgtgcggctgtatgcgccgttttccagcagggtatcgaacatctcatcgacggtttggtcgagcgagctgaagcggcggcggtcgatacccggctcgccatggatgccgacgccgaactccatctcatcgtctttcagggtaaaggagggctgtccggcggccggtacggtgcaggcgcccagcgcgatgccaatcgagtgaccaaggttatttaaacggcggcccagttcagagcaggcttccagcgagtcgccgcgttcggcggcggcgccgaccagtttttcaatcagcacggtattggcgacgccgcggcgtccggcggtatagaggctgtcttttaccgccacgtcgtcatccaccacgacggtggtgaccttaacgccgctttcgtgcagcagctcggtggcggtctcaaaattcaggatgtcgccggtatagtttttgataatcagcaggacgccttcgccgccgtcaatctgcatcgcgcattcgaacattttgtccggcgtcggcgaggtgaaaatttctcccggacaggcgccggagagcatgccctggccgatgtagctgcagtgcatcggttcgtgtccgctgccgccgccggagagcagcgccactttgccggcgaccggcgcatcagcgcgggtgacatagaccgggtcctggtgcagcgtcagttcaggatgcgccttcgccaggccgataagctgttcactcagtacatcttccacacggttaatcagttttttcattgtttatgctccgtagggtagggagaggtcgcctgtctataagggtagcccggcgatgtagtgattctggctgagcgggcgcaaaataaaatgccgtcaaaatatgttccataacggaacgtagaaaagaatttttgttcctttatggaacattaattgccgataaacaggagaaatgcgagccagcgctaataatttgtccgtttttttctgctatcagaaatggggcaaggatgatttttttcgccattgtgccgcattgaggcgattttctgcgttaaagaggggagacgatagcggcttttttgccaaaatgagccgatcgcgatcgcaatcccatcgctttttcagtcacattgtttcaatgtgaaacgtattatttttttatctgtttcagaacagaacaaaaaagggaaaaatttttttcgtcgctgctcgccctacagtggatgcatcgctccggcagcgtggctgtaagcgccattgatatcaggcgccgcggcatgacggcctgggctcacgtgtcaacatacgcacttatttgagggtgaaaggaatgctaaaagttattcaatctccagccaaatatctccagggacctgatgccgccatgctgtttggcgaatacgctaaaaacctggccgacagcttttttgttatcgccgatgacttcgtgatgaagctggcgggcgacaaagtattgaacggcctgcatagccacaatattagctgccatgcggaacggtttaacggcgagtgcagccatgcggaaatcaaccgcctgatcgccattcttaagcagcacggctgccgcggcgtggtgggtatcggcggcgggaaaaccctcgataccgcgaaggcgatcggctattaccagaagctgccggtggtggtgatcccgacaattgcttcaaccgatgcgccgaccagcgcgctgtcggttatctacaccgaggcaggtgagtttgaagagtatctgatctacccgaaaaacccggatatggtggtgatggacacggcgattatcgccaaagcgccggtacgcttgctggtggccgggatgggcgatgcgctctccacctggtttgaagccaaggcctgcttcgatgcgcgagccaccagcatggcgggcgggcagtccacggcggcggccttgagcctggcgcgcctgtgctatgatacgctgctggcggaaggcgaaaaagcacgcctggcggctcaggctggagtggtgaccgatgcgctggagcgtattgtcgaagccaacacctatctgagcggtatcggttttgagagcagcggcctggccggcgcgcacgcgattcacaacggtttcaccatccttgaagagtgccaccatctgtatcacggcgaaaaagtcgctttcggcaccctggcgcagctggtactgcaaaatagcccgctggaagagatcgaaaccgtgatgggcttctgtgaaaaagtcggcctgccgatcacccttgcccagatgggcgtgaaagagggtatcgaaagcaaaatccacgcggtggcgaaagccacctgcgcggaaggcgaaaccatccacaatatgccgttcccggtcaccgcggatagcgtctacgccgccatccttaccgcggacctgcttgggcagcagtggctggcgcgttaagtctttcacaaggttctatgccgcggcgcattgcggcatcaactcctccctccggcagccgctgccggagggttttgtcgttttaactgtgttaactccagcggaaaagggatatgacagctcagactcagggtgcggaaaatgaagtttcagccgttatcagccagtcgtggcatcgctgcagcaaatttatgcagcgggaaacctggcaggcgccgcatcaggcgcaggggctgacctttgaatcgatctgccgtcgcaaaaccgcgctgctgaccatcggccaggcggcgctggaagatgcgtgggagtttatggccaaccgttcctgcgcgctgttcatccttgatgagtcggcctgtattctgagccgctgtggcaatccgcagaccctggaacagctggcggaactgggatttcgcgacggcagctactgcgcggagagcattatcggcacctgcgcgctgtcgctggcctcgatgctcgggcagccggtcaacaccgcgggcgacgagcactttaagcaggcgctgcggcgctggtcgttcagttcgacgccggtgttcgataaccatggccgcctgtttggatctatttcgctatgctgcctgcgcgaagagtgggccccggcggatctgtcgctgacgttggccatcgcccgcgaagtgggtaactcgctgcttaccgacagcctgctggcggaatctaaccgccaccttaatcaaatgtacggcctgctggaaagtatggacgacggggtgatggcgtggaacgagcagggagtgctgcagtttctcaacgtgcaggcggccacgctgctgcatctcgatacccaggccagccaggggcggaatatcaatgagctgttgaccctgccggcgttgctgcgccgcgcgattaaacaggcccgcgggcttaatcatgtggaagtgaccttcgagagccagcatcagtttatcgacgcggtgatcaccctgaagcctatcgtggaagagcagggcaatagcttcattttactgctccacccggtggagcagatgcgtcaattaatgaccagccaattgggcaaagtgagccataccttcgaacagatgtcggcggatgacccggaaacccgcaggctgatccactttggtcgccaggcggcgcgcggcgctttcccggtgctgctgtgcggcgaggaaggggtgggtaaagaattactgagccaggcgatccataacgaaagcgagcgggcgccgggcccatatatttcggttaactgccagctgtacgccgacagcgtactgggccaggattttatgggcagcgcgccaaccgacgatgaaaatggccgcctcagccgactcgaactggccaacggcggcacgctgttcctggaaaaaatagagtatctggcccccgagctgcagtcagcgctgctgcaggtgataaaacagggcgtgctgacgcgtcttgatgcccggcggctgattccggttgatgtgaaagtgatcgccaccaccaccgttgacctcgccaacctggtggagcagaaccgctttagccgccagctgtactatgcgctacattcgtttgaaatagtcattccaccgctgcgggcgcggcgcggcagcattccttcgctggtgcatagccgcctgcgtcggctggaaaaacgcttttcatcgcggctgaaggtcgatgacgacgcgctggcccaactgaccgcctacccgtggccgggcaacgattttgagcttaatagcattattgagaatatcgcgatgagcagcgataacgggcatatccgcttaagcaatctccccgaacatctcttctctacccggcctggtagcgaaacggcctcatcgctactgccgtcgagcctgtctttcagcgccatcgagaaagaggcgattatccaggcggcgcgagtgaccaacggccgggtacaggagatgtcgcagttgctgaatattggccgtaccacgctgtggcgcaagatgaagcagtacgatatcgacgccgggcagtttaagcgccgggggcaggataagagttaagccaacggcgttaatatttttccggcagctcgttgacaatatcgacgagctcgccgtttttcatcgtgatatagccgccgtttttcagatcggaaagtacctgaaacagatagctacgcgacatttttgtgcgtcgcaggataaagttcgccaggctcgggtcgtgtaatacaccctcatttttctgcttgagatagcgataaatcatggagcgaatgacaaaatagcgggtgccaatagctctttcgtcatgcgcatcgagcaaaaacgccagcgtgatggccatcatgttcatcaggaaggtgaatttatcgggctgagtaaaatgtttctcaaagtattcgagattacagctgaacactttgacattttttttggcggtatagtgcagctgaatacccgggccataactttcgacaataccaaaaaacattcctttgatgcctttgccgacctgaaacaactttttcgcctgggttttcgcttttcctggggcgagaataaagttgtgctcctgcatctcaacggcaataacgccctcaagaacaataataatctcgcctgtactcagggtgaaagacgtatcatcggcaatctggcgtatattactgctatgacttaatgagtctatcgcctttatattctttgaaatcatcttattatattcatcgatgatgtgggaatagggcgtttgaatacgactcatcttctctccgggcttaactctaccgctttattactctttgctattttgcagtggcgatactttatattttaatggcgcggaattacgcctgatacaaaatatctaaatttaaaagctggcgccagatagcaggcatcacttttagagtccgttaacggactgatctatcgctctttttaaaacactcacttagactgttttagtgggtagttgggcttctttttttagtaactaagaatccacttaaatattgaatgataatattgcttttgcggcgggtttctttagcgaaacggtgatagtgatgcgctttgcataaattaaaaaataaaaccagaacctgtggatttttattgctttctctacttcacttaagcgcaatcgcctcagtagcgacaagaatatttgccgatgtcgctcatctcatattgagacttatctaatctgacaacgcctgcctgagtttagctaaatcgtaagttaaatcaggcgcattctgagcaatgaggtttgaagatgaataaaaaatacaagggtatcggcgtgctggcatttgccgccggttcgttattacccggcgcgacggccaatgccgccgatcaaaatgcggctggccccagcgatggtgcggcaaagaagcccaatattatcctgatcgtctctgacgataccggctatggcgacctcggcgtctacggcggcggcgaaggccgcggtatgccgacgccaaacctcgacagaatggccgatgaggggatgacctttttcgacttctacggccagccgagcagtacgccgggccgcgcggcgatgcagaccgggcgcattcccaaccgcagcggtatgaccaccgtggctttccaggggcagggcggcggtttaccgaaagaagagtggacgctggcctcggtactgaaaaccggcggctataaaaccttctttaccggtaagtggcacctcggcgaagccgattacgcgttacctaatgctcagggctacgacgaaatgaaatacgtcggcctctaccacctgaacgcctatacctatgccgacccgacctggttcccggatatggatccgcaactgcgtgaaatgtttacccgtgtcacccgcggcgcgctctccggcaaggcgggcgaagcgccgaaggaagagttcaaaattaacggccagtatgtgaataccccggtcgttgatggcaaagagggcgtggtcgggatcccattcttcgaccgctacgtcgagaaggcctcgctggactatctcgaagcaaacgcaaaatcttccgaaccgttcttcatgagcatcaactttatgaagaaccaccagccgaacatgccggatccggattacgtcggcaagtcgatgtcgaagagcaaatacgccgactcgatggtggaaatggatgcccgcgttggccatatcatggataagctgcgcgagttggggatcgataaaaacacccttgtggtatggaccaccgataacggcgcctggcaggacgtctatccggatgccggctatacgccattccgcggcaccaaaggcaccgaccgcgagggcggcagccgcgttccggctatcgcctggtggccgggcaagattaaagagcacagccgtaaccacgatatcgttggcggcctcgatctgatggcgacctttgcttcggtggccgggattaaattacccaccaaagatcgtgccgggcagccgattatcttcgatagctacgatatttcaccggtactgtttggtaccggtaaagatccgcgtacctcctggttctacttcactgaaaatgagttgaccccgggggcggcgcgcgtcggtcactataaggcggtgtttaacctgcgcggcgataacggcgcgaaaaccggcggcctggcggtggattccaacctcggctggaaagggccggagtcgtatgtcgcaacggtgccgcagattttcgacctctggcaggatccgcaggaacgctacgatatctttatgaacaactataccgagcatacctggacgctggtgaccttcaatgaagccatcactaagttgatgaaaacctacgtcgagtatccgccgcgtaagccgcagagcgaagcctacagtgggccgattaccctgtcgcagtatcaacgctttagtaatatccgcgagcagttacaaaaagaagggttccagttggcgatgccgaccggtaattaaaatgacgttggcccgggcgagatgtccgggccttttgctgttgtgagcattctagatataggttctggtcgatgaaaaaaagcaccaccattccattaacgccattacagaaccaggggcgctatctgcccgcctataaacgccgctatcacatgatggcgaaacccagcggctccacctgcaacctggactgtcaatactgtttttatctgcataaagagcagcttttacatcagccgcacgacaaaggaatgagcgacgaggtactggagaatttcattcgtcagtacatccaaagccaggacggcgaagagattattttctcctggcagggcggcgagccaaccctgatgggactggagtttttcgaaaaggtcgttgagctgcaaaagaaatatcagccgaagcaccagcgcattgagaacgatctgcagaccaatggcgtgctgattaacgataagtgggccgccttcttgaaggcgcataacttcctggtcggggtatcgatcgatggcccgcgcgagatccacgatcgcttccgcgtgacgcgcagcggcaagccgaccttcgataaggttatggaagggatcgcggcgctgaagcgccacggcgtgccgttcaacgcgctggcagtcgttaaccgggtgaatgcccgtttcccgcgcgaggtatatcgttttcttacccgcgaactcggcgccacctatatccagtttacgccctgcgtagaggccgccgagtttaaaactaccgcgccgcagttctggcgcgaagagacgatccccatcaccggcagccgccgggcgaaaccgggggatctggattcaatcgtcaccgactggtcggtggatccggacgattggggacattttctgaccgaagcttttgatgagtgggtgacctgtgatctgggccgcgtgcaggtaaatttgttcgaaaccgccgtggtacagactatggggcttccatcccagttatgcatcaccgcgccgttttgcggcaaggcgctggcgattgagaaaaatggcgacgtctactcctgcgatcactacgtctacccggaatataagcttggcaatattaaggcgcataagctggcgcatatggtcttttccgagcggcagaaagtgtttggcatgggcaagaaagagacgctgcccgcctactgcaaaagctgcccgcatctgaatttatgctggggcgaatgcccgaaaaaccgcatcgtgcgcgccccggacggcgaagaagggctcaattatttgtgtcctggctttcgccatttttacgcgacggttaaaccgacgcttgagaagattgccgccatgctgaagtaggtctggtttttggcggtggaataagaaggaaaaacaatgaaaaaaacagtactgctcagcatgctgctattgagcttcaccagcgcggcagccaccgatatgctgccggcatggaaagatacccctgctaaacaggcgattgagcaatgggtgcagggggcgacgcgtgaaggcggggcggactttattccgctggataagcgctacgtggtttttgataatgacggcaccctgtggccggaagcgccgctgactttccaactacagttcgcggtggatgaagtgaaacggctggcgcccgaccatccggagtggaaaaaggatccgctggtggcggcggtactgaacaacgatttgaaaacggtagcggcgggcggcgaaaaagggttgctcaagctgctggcgttaacccatagcggcatgaccaccgaagagtttagtcagcgggtcagcgcatggtttgacagccatcaggataaacgtaccggctgccgctatgaccagttaggatatcagccgatgcgccaactgctggactatctgcgcgccaatggttttaaaacgtggatcgtttcaggcggcgggattgattttatgcgggtggtatcggaaaaaatgtacgatatcccgccggagcaggttatcggttcgttcgcgctcagcgagtttagtctgacggacgatggcaccgagcttcgcaagacgatgaaaggcgcatttaatgatgatgccgcggccaagccggtggcgatccacctgtttatggggcagcgcccggttgcggctttcggcaacagcgatggcgatctggcgatgctgcagtacaccgctgccaacccaaactataaaaccttcgagctgctggtacaccataccgatgcggcgcgggagtatgcctacgacagccatccttccgccagcggcaagctggtgaaaggattgacagaggcgaaacagaagggctggacggttgtcgatatgcagcaggactggaagacgatatacgacccggcgcagtgtcaggcgaaataaaaaacgccgccgggcagtctggtagcccggataaggcgcaacgcgccgcctccgggaaaatccctggtggcgacgggccgccctctgtgcgctccctgcgccacggaaaattgcctaaggggccagcggcggcaacggctgcggctgccagaaacgccgccagcgtcgactaatgccgagaagcgttcgataacaccagcggcggccaaaccatccgcctccgaccgcggcggcggcaatcactatccacatcaggctctgccaggtgaccattcccgtggtaccgcgcagcgcttgctccgcgccgccctgtcgcgccgcggcgacgttcaacgtttctcccgccagctttgccgtttgccattgatgattaacggtatcccaccagcgcaagctaatcggtggtagcgtcagcgtgccgctatggctgggcagataacgcagccgctccacccgatgagcgcctatgatatcgccgcgctcgctttttaatgcctcactgaccggcgccagacgctggctttcgctaccgttaatggcgtacagcagcggtggaatttgccccggtagcgcatcccgcgcctcgacggtcacgatacggtcaacgacatcaccaacccgcagcgtggcgtctttccccgcgtggtactgttgaatttgctggctgagcgtcagctggctggccggtaaaaaatggtccgcctgagtggtattggccggccagtttaccgggcgttccagcgccggaagatgtaccgtgaccggcgcctgattggcggatgatgcggtaatgtcgatcgccggcaggcgtagcacgccctgctgccaggcgctgacctgacgttcaaggcgaatgccgctccagacgatcccgttcttcttgcgcgtcaccagctgtgaaggtaacgcggtattcagaagttcgccgtttttgacggcaaactcgggccactgcggcggcgggttaaaccagctatcggtccaccaggtgatcgccacccgaaccggctggccggggacaatctgcgccggcgcttccagttcacgggtgatgtccatcgccgcatgcgccggcagggtggcggccagcagaaaaagtagcgctttgttcatggcgtggtatctcccgagccgttgcgatacaggcttttcagtagccccgttggcgaaacctccagcgcatcaaaccattgattaacctgcggactctccccggcgatagcgccgatttgctgctgattgatgccctggtttttctgcaggtcgtggaccagcttatccggaccgtcgtccatcgcatcgccctgcgcctgttggcgctcgcgctcttgctggcgaatgcccatcacaatctgcgagattttatcgcgattttgcagcgccatgaaccagtcaggatgtaggtagagggcgcgatcgtagctgtcgagcgcctgctgccactgcttttgctgagcatagctgttgcccagccacagcaaggtttccgcggttggcggcgcggcgcgaaacgcgctggcggcggcaggatagtcgcccgcccgataccaggcgataccttgccataacggatcgcgataatgcccggcggcagcggcgtagtcgccgcggcgaaaggcgtgctgcccctgaatatcggggcgaacccaggcatcgagccaggcggcatcgctgtgcggcgaccacagcagcgcgggaaatagtagcgctaccatcagtaactggcgtcgccagaacagcagcaggaacagcatcggcgcgatcagcaggtagccgctgtttttccagtgcagatcctggcgggcgttattttgctgagtcaccgattgttgaatgtggctggcgatgatcggcagatcgtcggcatcatcgctggccagcgtcaccgggatcccggcgtcgcgcagctgacggaaacgatcgacgtttagtcgggtatcgatgccgaggctggcgtacttatccggcagcgttccacccgtggcggtgccggggacccaaatttgcagcggtagatgttgccctttcagccaggtgacatcggcaggcgacagggtatcggcaacgaggattaggctacgcgggctgtctttgtctgtaggcagattttttaacgccagtgcgacggcctgcggcagggcggaaccgctaccttccggcagcaaagagggcgactgggcgttgagaaatagctgataaaactgcggatcctgggttaacggcgtggtgagaaaggcctggctactgtagaccaccagaccgaaatgcgaaccgggctgccgttgcatcagcgcggcgattttatgctgcatgcgctgatgacgcgaggggggaagatcctgggcatacatcgccagatcctgctgcagaatcaccatcacgttgctttgcggcgtcagcgccgccgggagttcgcgctgccagcttgggcccgccagtgcgatgacaccgagtgtgagtagccacggcagcagccgggttaacctgcgacggcgttgaataatcaacgcgcgaaaaggtttatccattagcgttgaccaggcggaagcgccgtagccaggaagccaggccaccagcagacacagcagcagcgcggttaagcgccacggatagaggaagtgaaaatcgctcatgccattttctccctgaggacacggccgcaggcggccagcagtagcaatagcagcgcgacggcgagcggccacggatagagcgcctgatgccaggaccagccgaggcttttgacctgcgccggagtgagggcgtcgatttgttgccagacgctatccagcgcgctgccggaatgcgcggcggtccagctctggccgccggtggttttcgcgatgcgctgcagtagcggcaaatcgactttgtctttgctggtatcgctgaggtcgccgaaggcgatggtatgaacccggacatggtggtcggcagcaagctttgccgccagttcaggcgacagctgcgaagcggtatcattgccgtcggtgagtaaaatcgccagcttatcggcctgcttatcggggccattatccagcaccttaaccgccacgcccagcgcatcgccgatagcggtttgctggccaatcatgcccggcgctagctgattgatgcgcgtttgcagcgcctgtttatcttcgcttatcggggcgaagggccaggctttgctggcgaagatgaccatgccgatgcggtcggattggcgggcggcgacaaacttgcgcaccgattgctgtaccgcctgcaggcgtgtattaccgccctggacgtcatttttcgccattgacccggagacatcgaggatcagcacgatgtcgcgcatcggtctggcaatatattgtggcggcgtcaggtattccggccgcgccagcgcgcaaaccagcagtgaccagataagccagaacagcacggcgctggccccacttccgcgttttggccgggtatcgagctgtagcgcgtcaatgagcgagggtaaaaacggtacccgcacgcgctcgtcggtggtttttgccggtagcgggagaaaacgagtgagcagcggcagcgccagcagtagcgcggcccagggccaggcgaaatcaatgtgggcgagccattcagacatgtggaagctcctttagccactgcgccaactgagcgcgaagccgcgccttctgatggtcgttcagggcgttgtcggcccggcagtagcgggcgatgagctggtcgcgcaggtcagcatccagcatcaacgacgccagcacggcttccggcgccagcgtttggctaaccatctggcgcggctggtggaccagctgtacccgtttaatcaactgcatccagctatcgacggtatgcggatgattgagcgccagcagcgcttctcgtcgccagcggttgcgccgccagcgggcgtagcggataagcaggaacagcgccgccaggcctacggcaatcgcgagcagaatcagccagccgattggtagcggaaaccagctgggggcggggggcagcgcgggcgttagtagctccggcaccgcatagcctttctcaaacatttaaagccctttttgtaactggcgcagcaggtcctgagttaccgtcagatgattaacccgaatacccaactggttgagttgctgctgctgacgcgccagccgaccgatgatgtgttgacgaatatcggcgctgagcgcggaggtgagggtgacgctggcgctgcgcccgccgtagcaggcggccagcgtgccggagcgcggcaggcgaaggtgtaagtcgtcgaacagcacaaatgcgctgacctcgcagcgacggcgcagatgcgccagcatggccttcgcttgggcgtcgagatcgtgaaaatcgctgaggatcgcaacccaggcgccgcgcggaatcgtgctgaccgcgcgctgtagcgcctgcgaaagcgtctgcgtacgctccggctcgagaggatattgctgcgccagcaactggttgtaatgcgtcagatcatccagcagcgcgggtagagtgctacgcggggcgcggcaggggtgtagcgccaacgtggtatcgttaaataccaggctgccgaggcgatcgccatcgtgatggctacgccaggccagcagcgcggcggttttggccgcggcgctggctttagtttgcccgcgggtggcgaaatgcatatctaatcgttggtcgaccagcaaaaagaccgggcgctcgcgctcttcattgtactggcgcacccacggcgtacgtagacgggcggtcgtctgccagtcgatcatgcgtatgtcgtcgccgggttgataacgacgcaggctgtcgaaattgagcccacggccctgctggcgggaggcgcgttcgccggataacgcccctggtgggatctgtcccggtgggttaaccatcaaccgcgcctgcggcgcgaggtcgagcagcatctggcgattcacgcagagttcgttcattagatcaccacggcgttcagcagcatggtaatcacatcgtcggcgctgcaaccatcggcgctggcctgatagctcagcatcaagcggtggcgcatcaccgccggcgcgataaagcgcacgtcttccggacgaaccgcgtcacgtcccgcgagccaggcctgcgcgcgggcgcagcgctccagcgctaaggtgccgcgtgggctcaggccgtaagccagatagctggctaactgctcgctgatgtgctgaggctggcgggtggcgttgaccagttcgactatccaggtttcgacaatcggcgcgacgtggatggcgctaatttcctgccagcaggaggcaatttcctgttggctgaaccgcagtgattccgcttctggcgcgggggcggtttttgccgctacgccatatttcgcctgttgctcggcgcgaaccagctgcatcacctgccgctcatgctcttttgatggatagtcgaccagtactttcatcagaaagcggtcgagctgagcttccggcagcggccaggtgccttcctggtcgacggggttctgcgtcgccagcaccataaacacgcccggcagcggccagcttttgcccgccacggtgacgtggcgctcttccatcgcctccagcagcgccgactgcacgcgggccgaggcgcggttgatttcgtccgccagaatcacgttgccgaaaaccggtcccgggcgaaaacgaaactgctcctcttcgcggctggcattttgctgataaatctcgctgccggtgatatccgagggcagcagatccggagtgaactggatacggcgaaactcgccgaggatatgtcgcgccagctcgcggacggcgcgggtcttcgccagccccggcagcccttcgagcaggatatgcccatcacagagcagggcgatgatcagcatgcgaacgacgttttcctggccgagcacctgcgcattcatgcgctgctccagctgtaacattttatcgcgaaggttcatcggctaactcctttaaaatctcgtttcaccagcgtgacgatgcccgccagaatcggctcggcatagttgaaaaaggctttaatgcccgggcagagatagttcaaaccggcttcgccgtcggtggtgagcaccagacggtttttcgggcactcgccgtggcaaagcttcaggtaagggcactgcttgcactgctggggcagcgtgtcgcatttacccataccgaaagcctgctgacgttcggagaaagccattcgcgccaggctgttatcggcgatattgccgatttgatactccggatagacgtagtgatcgcaggagaaaacgtcgccgtttttctcgaccgcgagccctttgccgcaaaactccgcggtggtgcaaatttgcgccggcagacccatcatctgggcgacggcggtttcgaacagattgacctgtacgcggccaaggtcgttgttcacccactcttcgaaggttgcgatcaggaagcgtccccagtcgtccggggcgaccgaccagtcggtgactatggagtctaaatcgccggggcgcgcgcggcggctaccgacggtggggatgctgtcatcacgccagaaatgaggcgcggtctgggtaaagtccaccggttcgacgcaggggttaaactgcacgtaggtcgcccccagttcgcgggtaacaaagcggtaaacctctaatgggaaacgggcgttggtacggttgacggtcaccagcgcattgaatggaacgccgtggcgcttcagggcgtcgacgccggccatcactctatcaaacgttggtttgccgctgcgggtgatgcgatagcggtcgtgcaactctcgcgggccgtcaatcgacaggccgacaaggaattgattcgctttgaggaattcagcccaggcatcgttaatcaggataccgttggtttgcagatcgttttcgatccgctggccgggctttttatattgctgctggaatttcactactttgtggaaaaactccagccccatcagggtcggttcaccgccctgccaggagaagactacctgttcgccatcctgtccgtcgatgtactggcggataaagttttccagcgtttcatcgctcatgtagcagcgcttctcctgctggagtaagtgttctttgtgcaggtagaagcagtagctacaatcgagattacaggcggagccggtgggtttcgccatcacatgaaagcgacgttggtaagcggggccgttacccgcgtacttttctgccgaaggtaatgcgttaacaggcacggtggtgctgtgtttcataaataactcccggattagtcaggtcgagggtaaggcgagaagaaaacagggcggcggaccgccctgaagttggtaacagggttatttgcgcgcgccctggtcaagcatcgcgctgacatcggagacggtgaaggagcccggtttctgacgcggtgggaattctttaaacgtcgccagcatttcttttgccgacttctgcgcgccgcccatcaggaacatgcgatcgtagaaccaggattggtagcccatcccctggtcgcctttctccaggggatcgacggcaaggtcaaagatcatcggcgcacgcagtttggtgaacggatagcgccacagatcgagaccggtgtgttcctggatcataaagtggatcttccagcggccctgacgcattgccagcagatcgccgtcatcgctccagtagaagaattcgttacgctggtctttccctttgccctgcaggaagtcgagctggttatagccatcaaggtgaaccttgtaggtgatggacggcgttttataacctttcagcatctcttgcttgatgttgctgtcgccggcagcggcaaccagcgtcgggaaccagtcgtagctggcgaacatgtcgctcaccacggtgcccggtttgatgtggcctggccatttgatcatcgccggaacgcggaagccgccctcccagccggtgtttttctcaccgcggaacggagtttcgcctgcgtccggccaggtggcggtcatcgggccgttgtcggtggtgtagataacgatggtgttatcttcgatgccgagatctttaattttctgcagcacctggccgacgattttatcgtgctcaaccatgccatcggcatatgttcccagcccggtgacgccaacgctgtcgtctttgaggtgggttttattgtgcatacgggtggtgttgaaccaggtaaagaatggtttaccggctttcacctggcgcgccataaagtcgttgttggcggccagtgtctcttcatccacggtgcccatacgcttcacggtcagcggaccggtatcttcgatcttgccgtcagcggtactcttaattaccccgcgcgggccaaactgtttacggaagttcggatctttcgggtaatccgggttttccggctcttcttcagcattcaggtgatacaggttgccaaggaattcatcgaaaccgtgcgcggtcggcaggaattcatcacgatcgcccaggtggtttttaccaaactggccggtggcgtaacccaactgcttgaggacgttggcgatggtcggatcttctttctgcagaccctgcggcgcccccggcataccgactttactcatcccggtacggaatggcatctggccggtaatgaatgcggaacggccggcggtggagctctgctcggcgtagtaggaggtaaacttcgcgccctgcgcggcgatgctgtcgatatttggcgtctggtagcccatcagaccctgattgtaggtgctgaggttcaggtagccgatatcatcgccaaagataactacgatgttaggctttttagcatcctgcttcggcgctgcggcgtcggctgcgtgagcaacggtcaccgcgccggaagctaatgtcagcatactggccaacattgttctcttaaagggaatgtttttaaacatagctcgctatccttttatttttccgggtttttaaatgatctggaaaaataggttgttaacgaagcgtctaatttatttttaaattagcaagggtgttttttattaaaaataaattagacgcttcagtgggcaagaaaacgttaaacggttctcgtcggtgttggcattttatttagacgtatcggtcgatacgagagtggagtctctaaacggactgaaataaatggcaggatgaactaaaaatgctatctttaattgacagggttaactttgccagattatttttatgcatatttaaataaataggtattaatgaggcaacatgaaaacgacttattccgatgttattgatcaatataaccatgttgtcgccagcgatcttgagttgattcaaccgctgatctcggcaaatcagccacgaatcatcaaagataacggtgtgtttaaaatagaacccggcgaagtgattattgttgttgaaggcattattgcgatagaagtggaatacaacgcgggctttggttccgcgagtaaacgcggcgcgcggagtaaaacgctggacatgctgcagatcggtaaagggatccgcggtatgatctttggcattattgaaagctatggcccggcgctatcgctaaaatatacggcgaagaaaaatgtcaaaatagtgacctgcagtaaagaagcgtttgaacactattttattcaacgcgatcggtttgcttatctgatggaaattatggcatttcagctatcgctgattattgatgcacaccacgaaaagaatttaccttcacgctacgatacgattaaatcaatgatttaccgttacaaaaaacagcaggatgcgggagtattacatgatagaagcctggctagctttattctgaaaagaaccaaaatgtcgcgcagctaccttttcaaaattcttgctgagcttaaagaagggggatatatcaaaatggagaacggtgaactgatcgatattgcgcacgaactgccggagaaattttaacctcctgtgactgggcgcgaacgtcatttcagtggcgcagaggccgtctaacagatcctgggattactttactctttattacgcttgcctgctgggcgacgaatcatgtttgccgaagccagttgccgtgcggaatctagcccgtcgtgtttctcttaccgcgatgagaatggggagatagttgctctacaatgaccgtttgtaggtttgcttttatttgtggttatatctagaatgcagttaattattctgtcataaattcatcctgctagtgaaataaaccattgttttttcgttttaagggatacgattttgctgagaagggaggcttctttgtgttcaatggtgcagtgcgctctgacgtaaacaatttcgttaatatagaaaagggaaggcgcggtagaaagagtcagccgtttatctctttctccaaaaatggggggcatgtcaggatcgcggcttttattgctcgtcacggagaacatgttgatattcaaatagattattccaccagaaccatcagggttaagaaggtggaacatcacggcgtgcgtattaacgtcggcggcgtctttacccgtaaggtactggtgaagcagtttctgtttggcgagaagaagaccatccgcgtcgatctcacccaacaggacgatggctggttttatggcgacttgccggtagagttcacggccaattgcgcatagtgcgttattgcctgaattagccattatccaactatacagatacggagatagcggataatggcttttttatatcaatgagatataaatacgagtcattatagtttcgtattaaaaatatatttttaagtaaataagtaccattaaaccctattaaataatagttatttccaatgatatctttgcaataattaagggaaaatagagactcaaaaaaggaaacgataattaatggaacatttactcagacactgtgaaaaggttgccgttggcccctatagccgcgatgcccgtgcgctggcgcatgaagtgatcgataccatttcggcgggcgttccgccggagcagctgattctcccctggatgtcggttaaagaggggctgcccgacgccaatagcgggcgctacgtgtgcgcttatacacccgcgaaatctcaggaccgccgctatcagctggtctccgctgccatgttccgcaccgtttgtcgggacgccacccactggttttatatgtgggaagcgctgtgatggtgggaggtgtggggggatttgtagtggtttatgcttcaatgcatagattattttgctagtacagtgaatcaaagtttaacaacgtcaatataaaaatatttggtagttaaatcattcgcaccgctaaatccttatataataaatatactattgagatagtcgttagggagcaggattggactgtggttttttttatacaagttgttgaggggaagcatgatcgaaataataagtgataaaaaaatattaagaatcaccgcgtttgaaagagagaatacacctaatgcacctgcttatgattggataaaaacctacgtcgaatatcacctccctgaattgaatgtacaatatcaggcttctttcaacgttggtgaactttcctaactgaaagataatcttatcgcgttacatacccacttaataaatgaagatgcccataccgatgttatttttgaaagcaccgaaaatcagctaaatctagtatttacaccatcatcttttggccatggagcacttatgtcgttaacgttgaggccagaaaacccggctgaaagcgtagtgatcagtgattgtttggggcttgatgaaagctattttcccgcgctcattgctggtctggaagagatcatcaatttacaaagatgatgcattagagtgttgataagtaagatatttaattagaagccgccaggatgctactctatgaaatctgctcttgctaatctatgccaatccatcgggattcagtccgcgagtctgctggaagctatcacaacctgcctttgttctatcgccgcgctgggtagcctttttgtgcttgaaggctggggcatgaagatggctggttttgtcgggtttttggcgctggcttacgtggttgcctggatagtggatatagtaaaaggcgaaaagtagagccaaacattttgattcattactcagattcttgagatttggacggattggacttatcactatcagagcatcttttttgccggagggtgtgagcacatgtaagaggggctgccagataaaaaatcagccatttgtgcatagctcacatttgaacaattaaatggataaaccttttgatacttaagcaaaatatagtccatattatagccttgtaccgaacgtggatattttaaggataagaatatgtcagcagtaattgataaagcactggattttattaatggcatgaacacgtcatcttcagcaccgcacaccatggatgaaagtacggctaaaggcattttcaagtatcttaatgagttaggcgcgccggccagcgcggctgatgtatatgcccggggcactcaagagggctgggatcccgaatttactaaaacgttagcgggatgggcggaacgaattgagtccggcgagcgtatagttattaagaatcctgagtacttttcttcatacatgcgcgaggagctgcgggctctggtataggcagttctgctcaatttgagcatcagctttacaggcgcgtttgtactccgcagtacttgcctgccgtattctgtaggtatcctggaaaagactaagggcttacgagtaatcgtaagcccttgatatctggtggcccctgttgggtttgaaccaacgaccaagcgattatgagtcgcctgctctaaccactgagctaaggggccgtggcgagggattataatgtaactgcacgctgcaatccagcgtaaagcgctcggctgctgtttttataaacaatgcattttcaatcctttataatcagctttttagtcattcagccggagaaattatgattagcgatatcctggcgccggggctgcgggtggtcttttgcgggatcaatccggggaagtcctccgcgcatacggggttccattttgcccatcccggcaatcgtttctggaaggtcattcaccaggcggggttcaccgagcgacagctgaagccggaagaggagcagcatctactggataccggctgcggtatcaccatgctggttgagcggccgacggtacaggccagcgaggttgccctgctggagctgcgtaatggcgcgcaggagctaataagcaaaatccatgactatcagccgcaggcgctggcggtgctcggcaagcaggcctatgagcaggcgttcagggtgcgtggcgcaaagtggggaaagcaggaagcgaccatcggtgaaaccgaaatctgggtactgcccaatcccagcggtttaaaccgggcgacgctggacaagctggttgaagcctatcgcgaactggatgaggcgctggcggggcgagggcgctgatggcacctgaatcgcaggcataaaaaagctccccgcgggggagctttttactctctttgcagcgcgacgattaatcgtcgaggaagctacgcagcacttcagaacggcttgggtggcgcagtttacgcagcgccttcgcttcgatctgacgaatacgttcgcgggtaacgtcgaactgtttacctacttcttccagcgtgtggtcggtgttcatgtcgataccgaaacgcatacgcagcactttcgcttcacgagcggtgaggcccgccagcacgtcgtgcgttgccgcacgcaggctctcggtggtcgcagaatccagcggcagctcgagggtggtatcctcgatgaagtcacccagatgcgaatcttcatcgtcgccgatcggcgtttccatggagataggctctttggcgattttcagcaccttacggattttgtcttccggcatcagcatgcgctcagccagctcttccggcgtcggctcgcggcccatttcctgcagcatctggcgggagatacggttgagcttgttgatagtctcaatcatatgcaccggaatacggatggtgcgcgcctgatccgcgatggaacgggtgatcgcctgacggatccaccaggtggcgtaggtggagaacttgtaaccacgacggtattcaaacttatctaccgctttcatcaggccgatgttgccttcctgaatcaggtcgaggaactgcagaccgcggttggtgtatttcttggcgatagaaataaccagacgtaagttcgcttcaaccatctctttcttcgcacgacgggctttcgcttcgccgatggacatgcgacggttgatatctttaacctgctcgatggtcaggccggtttcttcttcaatctgctgcagtttctgcaggccgcgctgaacgtcttctttaacgtcatgcagcttctcggaccacggcttgttcatcgccacggcggcgttgaaccaggtttcgctggtttcgttgccggtgaacagggtgatgaagtttttcttcggcattttgcactgttcaacgcacagcttcatgatgatacgttcttgagtacgaacgcgatccatcatgctgcgcatgctgttgaccaggtaatcgaactgtttcggcaccagacggaactgtttgaagacctcggacagcttgaggatctcttcctgcgcggcggcgtggctgcgacctttcgctttgatggtgtcgcgagtcagctcgtactgggtgcgcagctcggcgaatttctcgcgggccagctccgggtcgatgctgttatcgtcatcgctgttgtcgtcgtcatcatcttcttcttcatcttcgtcgtcgtccatctcttcctgagacagctcggaaccgacgtgagtggcggtaggcgccatatcttcttcagcgttcggatcgacgaagccggtgatcaggtcagacaggcgagcttcttcagcttcgacgcgatcgtactgttccagcagataggtgatggcttccggatattccgcaacggaacactggacctggttgatcccgtcttcgatgcgtttagcgatgtcgatttcgccttcgcgggtcagcagttcaacggtacccatttcgcgcatgtacatgcgcaccgggtcggtcgtacggccaatttcagattcaacgctcgacagcacctgggccgccgcttcttctgcgtcttcatcggtattattggaggtttcagcaagcagcagatcatcggcatccggtgcttcttccatcacctgaatacccatgtcgttgatcatttggatgatgtcttcgatctgatcggagtcgacgatatcttccggcagatggtcattgacctcggcataggtcagatagccttgctccttaccacgttggacaagaagcttcagctgtgactgcgggttttgctccataagacggtatccacacttaattcgtttgattggtgcaggcagacgaactgccaacatttaaagcgagggcgtacttatattattgccgctgcgcctcagcgcggctgtcgggggcttcccgatcgatattcggcacttaagccgttaaattcattttttggccagttcctggctgatagtccagagttcccggcgctcctcactgcttaaaccgtgtgtgcgatcgcgagctatcaactcttcttgtcgcagttccagcagtgagtcaaacatatggttgagcgagtcggtgaaggtttgttcagcgatatccttatctgctatatcgtcccacatcgacagtttttcaagggttgctgcttcatttgtcccgcgatactgttctaaaagttgcccggtggtcagacctggctgcgccagacacgtattgaccagttcgctgaataaaccaagtcctggcatcttctgctgatccagacccgtcaagggcggaaccagcggcgccagatcggggttctgcaccagtaaccctataagtatacgcatggtcgtgcgttttagctgcggcgccgggcgttgagcgctattttccgcctgtttcggcattaaacgttcaagctgggcgtcatccagaatacccagcttgttacccagctcctgacgcaaatagatgcgcagcgtttcacccggcacctgagttatcagcggcagcgccagcgtactcagctgcgcgcgcccatccggagtgctcaggtcgacctgcggcatcaggctattgaataaaaacgtggagagcggctgtgcctgctccatccgcgcttcaaacgcctctttgccctctttacgcaccagcgtatccgggtcttcgccatcaggtaaaaacataaaacgcagctggcggccatcggtcatatacggcagcgccgtttccagcgcgcgccatgccgcgtcgcggccagcccggtcgccgtcgtaacagcagatgacctgattggtcgcccggaacaacagctgaatgtggtcggcggtcgtcgaggtgcccagcgaggccacggcataattaatgccgtactgcgccagcgcgacgacgtccatatagccttcgaccaccagcagacgctgaggttcggcgttatcctgctgcgcttcatacaggccgtacagctggcggcctttatggaaaatatcggtctccggggagttcaggtattttggcagcgcatcgcccagcacgcgcccgccaaaaccaatcacccggcctcgcttatcgcggatcgggaacattacccgttcgcggaagcggtcgtaactgcgcccctgatcgttggtgaccagcatgcctgcatcaataagcgactggcggttttcctgattgccgccaaaacgttttaaaacgttatcccagccagggggagcgaagcctattgcgaagcgggtaatcacctcgctgcttaagccgcgttttgccagatactggcgcgcgggttcggcggcgggttgattcagagactgttggtaaaacgtgttcagaccgtccagcagctgatagagattttgccgctgatgccgttctatctggctcggtccattacctgcttcatagggcacttcaaggttgtgcatggcggccagctcttcgacggtttcgacgaactcgagcttgtcgtagttcatcagaaagtcgatggcgttgccgtgcgcaccgcagccgaagcaatggtaaaactgtttttcaccgttgacggtgaaggagggggttttttcgttatggaatggacaacacgcgtgataattcttgccctgctttttcagcttcacccgagcatcgatcagatcgatgatgtcggtgcgcgccagcaggtcattgataaatacgcgtgggattcgtccagccatatgccccgtaatctatacactgcatcctgcaaacggcctcgatgtattgcctgaagacagtttgaacgatctcgtgtatctgctaatgcataaacgaaaataagccgcgcattcctttcggaagcacggccttacaactacaactcggtctgaattgagagcttcgctctcaacagattagtacagacgagtgcggcgtgcgttttcgcgagccagtttcttcgcgtgacgtttcactgcagaagctttagcgcgcttacgttcggtagtcggtttttcatagaactcacgacgacgaacttccgccagaacacctgctttttcgcaggaacgcttgaagcgacgcagagctacgtcgaacggctcgttttcacgtactttaattaccggcatgtgcctctcacctttgattaattcggtttgccgctggccgcaatgccagcttatttcaaaatggtgcggaattttactgcaactactgctgctttgtaaagcaccggcgccttttttgaaaggggacttttataagggtgaggagtatacacgaagagaacaccaggggtgagcaaagttttacatcgccggtcattggtcctacactgcgcggtattgaaacgaggtaaaacaactcatgcgtgtactgggaattgaaacatcctgcgatgaaaccggcatcgctatttacgacgataaacaaggtctgttagccaaccagctgtatagtcaggtgaaattacatgctgactacggcggcgtggtgcctgagctggcgtcgcgcgaccacgtacgtaaaaccgttccgctgattcaggcggcgctcaaagaagcgggcctgacggcgaaagatattgatgccgtcgcctatacggcaggccctggcctggtgggcgcgctgctggtcggcgcgaccgttggccgctcgctggcgttcgcctggaacgtgccggcgatcccggtacaccatatggaagggcatctgctggcgccgatgctggaagataacccgccggcgttcccgttcgtcgctctgctggtttccggcggccacacccagctgattagcgtcaccggcatcggccagtatgagctgttgggcgagtcaatcgacgatgccgctggcgaagcctttgataagacggcgaaactgctggggctggattatcccggtgggccgatgctgtcgaaaatggcgtcccagggtacggaaggccgcttcgtcttcccgcggccgatgaccgatcgtccggggctcgacttcagcttctccggcctgaaaaccttcgccgctaataccattcgtaacaacggcgacgatgagcaaacccgtgccgatatcgctcgcgcatttgaggatgcggttgtcgatacgctgatgattaaatgccgccgcgcgctggagcaaaccggctttaagcgtctggtgatggcggggggcgtgagcgctaaccgtacgctgcgcgcgaagctggcggaaatgatgagcaaacgcggcggcgaagtgttttatgcccgtcctgagttctgtaccgataacggcgcgatgatcgcttacgccgggatggtccgcctgcagggcggcggcaatgctggactcggcgttaccgtgcggccgcgctggccgttggcggaactgccggccgcctgataagcctgttacaaacaaaagccgcccatcgaggcggcttttttacgcgtggattaaggctgctgataatcctcggcgtcgatgtcgtagcccgacggctcccagcggatagccaacagcgacaatagcccaatcagcggcgccgcggcgatgatccagaagacgcgggtatccagcgcggcgaccagcagcgggaagaggaataaagaaagcgttgagctgccgcgcatgagcgtctggttgagcccgacgccaacgccgcgcagcgatgtcggatagcttaacgaggcgaaggtcatggtgtgcgcgccggggccgaacccctggccgaaaaggaacagtgccagcatcgccacggcagcgacgccttcacctgcgccatcagggcggccaatcagcgccaggccgagcagcgccgtcagctggcagccataacccgccagcgacatccgccacgccccgaagcgcggtaccaggcgtaccgccagtatccctcccacgaaagcgaacagcagattcagcgccagcgaaatcaaaatcgtcgtcagcatcgattgcacgaagaagctggagatgatcaccggcagaccgaacgcgacggcgttataggcaaatgaggaaaccaccgatagcagggtagagagcgtcgtgcggcgcaggtagacaccgcggaacaggcgcagatagttactccattgggcgctacgaacttttggcgccggtttttccagcgcgtcctgggcaacgtgcgcattgatgttgtacgcctggcgtagaatagaagcagcttcacgcaggttaccctggttggcggcccacaccggcgattcgctcatgtagcggctacggatagcgataatcaccagcgccgggatggcgccaaaaccaaggataatccgccatagccagtcgctatggctttccggcaggacggcataaaaaaagagtaccagcagatatgaaatgctgatcgccgcgtaccacgttgggcaccacatcgccacgctggccgccttgttgccgggacctttgagcctcgcgaattcgctgagaaacgccatcgccaccggcaggtcgatcccgacgcccaggcccatcacgaagcgtgcgccggtaaggacgtattcattcggcgccagcgcgcaggcgatggccgctaccacgaagaacagcatatccgccataaacacacggtagcggccaattttgtctgcggataaccgccgagtagcgcgccaacgatagcgccgaaggtgatggccgaggcgaccatcccggtaccgcgcaggcttcaggttgaattcccgggtgatatctttcaggccgaaggccagcgagccaagatcgtaggcatcaaggaaaataccgccgagggcgattcccatgacgatacgcgcgttattgcgcccgctgctgccttcgtttatgaggcgcgagacgtccgccgcgctgccgatccattttacttccccgccgggcgacgcagaggttgccgcaggcgtcgcgttaattacatcagtcatggtgttgtgcttttttctcttataaagagtttcagagtaaacagcgacgcgggggggaaaaaatcacttttggttataactcataactaagttattgtagtgaaaggattatctttggttttctcatttgccgctatgattggctaaaaaagtgggaaatagaatgcgtttgtggcggcaaaacggcccggcccaggcggccgggcgcggagattatttctgctctggcgtttttttcttcttcttaaagcgtgaccagattttcgtttcctgacggcgccacagacgctggatattgtcgtgatggcgtagcaggatcaggcaggagagcatggagaccgggaaagtatactgcggtttgaaccaccagacgtagaaaggggctaccaacgcgctgacgatagcgcccagcgaggaatacccgctgagcagaatagtcagcagccaggtgccggccattacgccggtgagatcccagccgatgggcgcgatagcgccaaatgcggtcgccacgcctttaccgccgcggaaattaaagaacaccggccagatatggcctacgcaggcggcgatcgccaccagcccgagccagaacggcgtcagaccgagcgcccaggcgccccaaaccggcagcatccctttcaggacatcaaaaattaataccgttacggctgctcccttgccgccaattcggagtacgttcgtcgccccggggttgccggaaccgctatcgcgagggtcgggcaaaccagcaagacggcacaccagaatggcgctggaaattgagccgcagaggtaggcgaggataactagtccaggcgcgattgcactcatcagctgttccattttgaaaacgtcgttagaaccccacccattttcgtgttaacagcttgttggctttctctgcgcgataggttacatagtgatgctgctatgttcccgtaatcttgctgcgtcgccgctgtcagggcacgtgaattctttaggggatgtctttgcatctgtggataatacgcataattcgccggaagtggtatccggtttagccaaaaagcaggcaggtcgtgatggatattgtatttatagagcaactttcggtaatcaccactatcggtgtttacgactgggaacagaccatcgaacagaagttagtgttcgatatcgaaatggcgtgggataaccgcaaagcggccgccagcgacgatgtgagcgattgcctgagctatgctgatatcagcgaactggttatcaaccacgttgagggcgggcgttttgcgctggtcgaacgggtggcggaagaggtagccgatctactgctgcaaaaattcaattctccgtgggtgcggattaaagtcagcaagcctggcgcggtggcccgtgcggccaacgttggcgtgatcattgaacgtggcagtaatctgaaacaaaacgtttctcgtcataatgtttaaacaaatttgttttataccggtcttagtgcctggattttaattttactttttattttaagggtttattgaatgggcgatttacactcgctgctgatagcggcaattttgggtgtggttgaagggttgacggagtttttaccggtttccagtacgggtcatatgattatcgttggtcatctccttggttttgaaggggataccgctaatacttttgaagttgtaattcaattaggatctattctcgccgtcgtcgtggtgttctggcgtcgactgtttggcctgatcggcattcattttggccgtccgccgatgcatgaaggcgaaggcagcgggcgcctgtcgttgattcatatcctgttaggcatgatcccggcggtggtgctggggctggtgttccatgacctgattaaatcgctgtttaacccggttaacgtgatgtacgcgctgattgtcggcggcttcctgctgatcgcggcggagctgttcaaaccgaaagagccgcgcgcggtgggcattgatgatatgacctatcgtcaggcgtttgccatcggttgcttccagtgtctggcgctgtggccgggcttctctcgctccggggcgaccatttccggcggcatgctgatgggcgttagccgctatgcggcatccgagttctcattcctgctggcggtgccgatgatgatgggcgctaccgtgctggacgtctacaagagcatcggcttccttaataccggggatattccgatgttcgccgtcggttttatcatggcgttcatcgtggcgctgattgcgattaaaaccttcctgcagctgattaaacgtatttcgtttattccgtttgcaatctaccgctttatcgtcgcggcagccgtctacgtggtcttcttctaaggccctggccctcagccttgcggctgggggcaacgttgttctttccactgccccacggccgcaattctgcgccgcgtcagctcttcgcgaatctccagtcctttgaaaccttccgctaccacctctttagtggaaaccgactgcgcgacttcccaggcctcaagcagcaggcgcccctgcggataatcgcaggattcaaaaccggtacgcccgcgcacgtcggcctcgctggtgagggcgatttgctgtacacgctgcggcttgcgccaggcatcgatgctatcaaacagcttcacgatggtttttggctgcagaatcggcagggtgtggatcagatcgtggaattcggcgaccagtctggccagatcgcgaatatcgttcggcacccgcaggcgctggcaaatctgttccaccagttttacccccgccgggccgtggccatggtggcgcggccagaactctttgggcgttaagcccttgccaagatcgtggcacagggtggcgaaacggacgtcgatggccggcgatagcatcgccgccatggtgagcgtcatcagggtgtgaacgccggtgtcgatttccggatgccatttggccggcgcggggacaccgtacagggcgtcgatttccgggaacagcaccttcagcgcgtggcagtcgcgcagggtctggaaaaagacctgcggattacgcgtgccaagcgcgttttccgtctctttccatacccgctccgccgtcaaatgcgccagttcgccggcgtccgccatcgcgcgcatcagcgccatggtttcatcggcaatgcgaaaaccgagatgggcataacgtgcggcaaaacgcgcgacgcgcagtacgcgtagcggatcttcgctaaaggccggggagacgtggcgcagcaggcgctggcgtaaatcggcctggccgccatagggatcgtaaatctgaccgtcagtgtcctgagccagcgcgttaatggtgagatcgcggcgcagtagatcttgctcaagggtgacgtcagtggcggcataacaggtgaaaccggtatagccggaaccggatttacgttcggtacgcgcgagggcgtactcttcacggctttgcgggtgaagaaacacgggaaaatcgcggcctacctgttggtagcccgcgtcgagcaactgctgtggcgtggcgccaaccaccacccagtctctgtctttgaccggtagtcctaataacgcatctcgtaccgcaccaccgaccaaataaatcttcacgcctgtttctcccgcatcgacttttcgcaagatgatacgtaagtctggcagagaagacgaattagttcatccaccggtctttacgcttgcggctcggtaccagatgcggcagcaccagaccaaggatcagaccgacgccaagcacgccgccgccgtacataaaccactgcatgataatggtgcgctgtttatcatcaagctgcagattcgccgcgttcacctttttttgagcgacaaccagctcgtttttcagcttttggttctcttctttcagggcattgatcgcgccatcgctaccggcgacttttttctgcatgtcggcggtacgctggttccaggtggcgtcaatattgttcagtttgtcggtcagcgttttgacctgattttccagatccggcacgcgaatgcgcaggctgggctcgttgctcagctctttcagcgggatccaggcggtacggccgttgctatcgcgtacctgcgcgtaattcgtgctgtcgttggtttgcagaacgtcgacggcttcgccggcgttaatggtgccgaccagacgatagttatcgccaggaccgctgcgaacccaggtgctcagctcatcggaaacgtagcgcttttcttctgcgtgaaccgccgtagcggcgctaagcgctagcaatgtaaaggtaataaggcgtaattttggcatcaggtcatcgtttggtcataaaaagttgaacgatagtagtggcatcgccagagcgacgcaaagttttccgccacaatcggaatcatccaaatgcagctggcaaatgcgcattgcatggcgattcgccgcaaaatactatttactgacaaaaaatatcgtcattagttcgccgcattttcccggcgacgcttatcaggtggaagaattcagccatggctcaagaaatcgaactgaagtttatcgttgcccacgacggcgttgaggcgctgcgccagcatctcaattcgctggatgcgcagcacacgccggcaggccaactgctgaatatttactacgaaaccgccgataactggctgcgtcggcacgacatggggctgcggatccgcggcgatcgggagcgttatgaaatgacgctgaaaattgccggtcgggtggtgggcggcctgcatcagcgtccggaatacaatattccgctggaaaaagcagagctggcgctggataaactgccggcagaagtctggccgcaggggcagttgccggcagaactggcgcaaaatgtgcagccgttgtttagcactgatttcctccgcgagaaatgggtgatgaaagagggcagcagccagattgagatagctcttgaccttggcgaagtgaaagccggtgagcatcaggaagccatttgcgaactggagcttgagctgttgagcggcgataccgccgacattctggcgctggcgcgacgtttactggcaaccggcgtattgcgccagggcagcctgagtaaagcggcgcgcggctatcagctggcgcagggcaatgaagcgcgtccggttaaaccgttaacggtagtgggcgtggcggcgaaagccagcgtcgagcaggggctggaagcggcgctggaaagcgcgctggcgcactggctctatcatgatgaagtctggaaccggggcaacgcggcagctaaacgtgaaatccagcaggcgatggctcgcgttcgccatgcgctggtgctatttggcggcattgtgccgcgaaaagccaccgtacagttgcgtgaatcgctcactgaggccgaagcggcgctggacggcgcggagaaagccgaagcggcgttgttcaaccgcgccacggttggcgccaaactgctgctgaccgaatggctggttacccgcggttggcgttcgttcctcaacgaggcggggcaaaagaaaatcgccggttcgttcaaacgctttgccgatatccagctgtcgcgagcggcggcggagctgaaaagcaacttccagcaaacgcaggacgactacagcgatcggctcacgcgtctggcgcgcgagatcgacagcattcaattgctttccagcgcctatgccggggtagccgaggcctggctggaaaactggcaagaggtgcgccgcgctatcgagaacaatgaccgcagcgtcatcgaatatttccgtcgtcaggcgctggccgcggaaccattctggctgcatagtggaaaacgataatttcaggccagggagacccctataatggcgctttcttcgcagttacagcagcactggcagacggttgttaaccggcttccggcagattttcccctgcaaacgttaagttcgcaggcgcagtcggtgatgacgttcagcgagttcgttgaacagaatctggtcgctcagccgcagtggctggctgaactggaaagcgcgccgccgcaggccgacgaatggcgccattacggcgactggctggcggaacagctacaagacgtgactgacgaggccgcgctgatgcgcgagctacgccagttccgccgccggatgatggtgcgtatcgcctgggcgcaggcgctgctgctggtgagcgaagagagcagtttgcagcagctcagcgccctggcggagaccttaatcgtcgccgcccgcgactggctgtacgccgcctgctgccgggagtgggggacgccgtgcaatgcgcagggcgaagagcagccgctaatgatcctgggcatggggaaactgggcggcggagagcttaacttctcttccgatatcgatctcatttttgcctggccggaacacggcgccacccagggcggacgccgcgagctggataacggccagttctttacccgtctgggccagcgattaatcaaagtactcgatcagccgacgcaggatggcttcgtctaccgcgtggatatgcgtctgcgaccatttggcgacagcggcccgctggtgttgagctttgcggcgctggaagattattaccaggagcaggggcgcgactgggagcgctacgcgatggtaaaggcgcggatcatgggcgataacgacggcgtgtacgccaacgaactgcgcgccatgctgcgcccgttcgtcttccgccgctacattgatttcagcgtcattcagtctctgcgtaacatgaaagggatgattgcccgtgaagtgcgccgccgcggcctgacagacaacatcaagctcggcgcgggcggcatccgcgaaatcgaatttatcgttcaggttttccagctgatccgcggcggtcgcgaaccggccttgcagcagcgcgcgctgttgccgacgctcacggcgattgacgagctgcatttgttgccggaaggcgatgccgcccagctgcgcgaagcctatctgttcctgcgccgtctcgaaaacctgctgcagagcattaacgacgagcaaacccaaaccctgccgcaggatgagctcaaccgcgcgcgtctggcgtgggggatgcgcgtcgccgactggcagacgctaagcgcacagctggaagagcagatgcgccgcgtgcgtcgcgtctttaacgaactgattggcgacgatgaagcgcaatcgccggatgaacagctggaagagtactggcgcgaattgtggcaggacgcgctggaagaagacgacactacgccggcgctggcgcaccttgatgacaacgatcggcgcagcgtgctggcgctgatcgctgattttcgcaaagagctcgaccggcgcaccattggcccgcgcgggcggcaggtactcgaccagctgatgccgcatctgctcagcgaggtctgctcacgggcggatgcgccgctgccgctggcgcgaatcaccccgttgctgaccggaatcgtcacccgtaccacctatctggagctgctcagcgaattccccggcgcgttaaaacacctgattagcctgtgcgccgcttcgccgatggttgccagccagctggcgcgccacccgctgctgctggacgaactgctggatccgcacacgctttatcaaccgacggcgaccgatgcgtaccgcgatgaactgcgccagtatttgctgcgcgtgccggaagaagatgaagaacagcagctggaagcgctgcgtcagtttaaacaggcgcaattgctgcatattgccgccgccgatattgccggcacgctaccggtgatgaaagtgagcgatcacttaacctggctggcggaggcgatgatcgacgcggtggtgcagcaggcgtggcttcagatgatcgcccgctacggtcagccgactcatcttcgcgaccgccaggggcgcggttttgcggtagtgggttacggtaaacttggcggttgggaactgggttatagttccgatctcgatctggtcttcctccacgactgtccgatggaggtgatgaccgacggcgagcgggaaatcgatggtcgccagttctatctgcgccttgcccagcgaatcatgcatcttttcagcacccgcacctcgtcgggcatcctgtatgaagtggacgctcgcttacgtccatccggcgcggcgggcatgctggtgaccaccgccgatgccttcgccgattatcagcgcaatgaagcctggacctgggagcatcaggcgctggttcgcgcccgggtggtgtatggcgacccggcgctgcaggcgcgctttgatgcgatccgccgcgatatcctgaccacgccgcgtgaaggcgcaacgctgcagaccgaagtacgtgagatgcgggaaaagatgcgcgctcatctcggcaataagcagcgcgatcgctttgatatcaaagccgatgccggcgggatcaccgatattgaatttattacccaatatctggtgctgcgctacgcgcatgaaaagccaaagctgacgcgctggtccgataatgtgcgtattctggaactgctggcgcagaacgacatcatggatgaggacgaggcgcgggcgcttacccatgcctacactacgctacgcgatgcgttgcaccatctggcgctgcaggagctgccgggcaacgttgcgccggatgctttcgacggtgaacgtcagcaggtgagcgctagctggcggaagtggttgatggcttaactaacaaatcgggtgtgctattatcgcgcgcaaagtttgcatctcgcaggagagagtaatgaaagtaacgctgccagagtttgaacgtgcaggagtgttggtggtaggcgatgtgatgctggaccgctactggtacggccccaccagccgtatttccccggaagccccggtgccggtggtgaaggtggaaaatatcgaagaacgccctggcggcgcggctaacgtggcgatgaacattgcgtcgctcggcgcgacttctcgtctggtcggcctgaccggtatcgacgatgccgcgcgcgcgcttagcaaagcgctggctgacgtaaaagtgaagtgtgatttcgtgtcggtaccgacgcatccgaccatcaccaagttgcgcgtgctgtcgcgcaaccagcagctgatccgcctcgattttgaagagggtttctccggggttgatccacagccgatgcatgaacgtattcagcaggcgctgggttcgatcggcgcgctggtgctgtcagactacgcgaaaggcgcgctggccagcgtgcagaccatgattaagctggcgcgggatgccggcgttccggtgctgattgatccgaaaggcactgaatttgaacgctaccgcggggcaacgctgctgacgccgaacctgtctgaattcgaagcggtcgccggaaagtgtaaagatgaagcggaaatcgtcgaacgcgggatgaaaatcatcgccgacttcgagctttccgcactgctggtaacgcgctccgagcagggtatgacgctgctgcagccgggtcgtccgccgctgcatatgccgacccaggcgcaggaagtgtatgacgtcaccggggcaggcgacacggttatcggtgtgctggcggcgacgctggcggcgggtaacaccctggaagaggcctgctatttcgctaacgccgcggccggtgtggtggtcggcaagctggggacttccaccgtttcgccaatcgagctggaaaacgcggtgcgcgggcgtgccgataccggttttggcgtgatgagcgaagaagagctgaaacaggcggtcgccgcggcgcgtaagcgtggcgaaaaagtggtgatgaccaatggcgtcttcgacattctgcacgcgggtcacgtttcgtatctggccaatgcgcgcaagctgggcgatcgtctgatcgtcgccgtcaacagcgatgcctcaaccaaacgtctgaaaggcgaaacccgcccggtgaatccgcttgaacagcggatgatcgtgctgggagcgctggaagccgtcgattgggtcgtgtcgtttgaagaagatacgccgcagcggctgattgccgggatcctgccggatctgttggtgaaaggcggtgattacaagccggagcagatcgccggcagcgaagaggtatgggccaacggcggcgaagtgctggtgctcaactttgaagatggctgctcgactaccaatattatcaagaagattcagaaagatagcgacaagtaattaatacgctttaccgctctgaacggagcggtctacaacggcctgcggggataccttcgcgggccgtttttatttaatcatgcggaaaatgatttagcgcaataaataacccggttaagcgcatttttcgtacaaaatacgttaaggtaagcgtaaatactgaagtgagtaaaaggcatatgaccaatcagaacgccaacggctgaaggagtatgcggatgaaccataacgatatgtattctatgaagaacttcgattttctggcacgtagtttcgccaggatgcacgcgcaaggccattcggttgatcttcaggctattgtcggcaatatggatgaggaacatcgtgaatggttttgccaacgctatgagctttattgtcgtcaggtgaatagcccggccgagttagagcactaagccaaatgaaaacgggccattcaggcccgtcagactactgacaaagaaggaaaaagcgtggtttttccttctttgtggttatcagccgaaaatcaataaattgattttccatattttttatcggtgcaatctgtaagtgcaaagattgcatgaggtttatcatcaatctcaaacgggccattcaggcccgtttttttattgctgttcttcgctcttcggcgcagctgaacggctttccagatcgctaatgcgctgctccagtaaagccagcttttcgcgggtgcgcagcagaacctgagtttgcacatcgaactcttcgcggctgaccaaatccagacgagttaactgcgattgcagtacctggcggattttcttttctacgtcatctccaagatcgcgaaggcctttcggcatcgattcatggacctggcgggcgatttgttcaatttttttcgggtcaatcatggcggattcctgcactggtctagttagcgttcattgtagtgcgaacgggagcgcctataaaccacaaatgtaagatgtcgagtgagtagccattgatgaagatagttaatggcgttatagttatctcgcttattctcagggcggggcgaaattccccaccggcggtaaatcaacctgcgcgttgaaagcccgcgagcgcttccagtgaaaacgggaaggtcagcagatccggtgtaattccggggccgacggttaaagtccggatgggagagagtaacggctcagtcgggttacgatccgcttgcgttgacttttgccgctaaaccggcactcctaagactgccctgattctggtaaccataattttaatgaggtttttttaccatgaatcagacgctcctttcttcttttggtaccgcttttgaacgtgtggaacacgctttagacgcactgcgcgaaggccgcggtgtgatggtgcttgatgatgaagaccgtgaaaacgaaggcgatatgattttcgccgccgaaaccatgaccgttgagcaaatggcgctgaccattcgtcacggcagcggcattgtctgcctgtgcctgaccgaagatcgccgcaagcagcttgacctgccgatgatggtggagaacaacaccagcgcctacggcaccggctttaccgtgaccatcgaagcggcagaaggcgtaaccaccggcgtatccgccgctgaccgcatcacgaccgtgcgcgccgccattgccgatggcgcgaaaccttccgatctcaaccgtccgggccacgtcttcccgctgcgtgcgcagccaggcggcgtaatgacccgcggcggccacactgaagcgaccatcgacctggtgatccttgcgggctttaaaccggcaggcgttctctgtgaactgactaacgacgatggcaccatggcgcgcgcgccggagtgcatcaagttcgctcagcagcacaacatggccgttgtcaccattgaagacctggtggcttaccgccgcgagcacgatcgcaaagccagctaagttaccgctgttctgatgacaagcccactttacggtgggctttgttgtttctgggtcgagctaatatgctttctctgcgggtacatgggagagatttttcaccttcaaattttctgatgatgatcatcacgcttatctgagtttatctgcggctaaaagcgcgtaatgtgaaggaatcaaatactccctactgaaggataccatcatgtcccgtacccgtatgccagcgttgtttttaggccatggtagcccgatgaacgtgctggaagataatatctatacccgcgcctggcgtcatctcggcgaaacgctgccgcggccgaaagctatcgtggttatttccgcgcactggtttactcgcgggacgggcgtgacggcgatggaagcgccgaaaaccattcatgattttggcggtttcccgcaggccttatacgatacgcactaccctgcgccgggatcgccggagctggcgcagcatctggttgaactgctggcgccggtgcccgtcgccctcgataaagaggcgtgggggtttgaccacggttcgtggggagtgctgataaaaatgtaccctgatgccgatattcccatggttcagttaagtatcgatagcactaagcccgcggcatggcatctggagatggggcgtaagctggcgtcgctgcgtgatgaaggcattatgctggtggcgagcggcaacgtggtgcataacctgcgtaccgcgcgctggcatggcgaaagcacgccgtatccgtgggcccagtcgtttaacgactatgtcaaagcgaatctgaactggaaagggccggtcgaagcgcatccgctggtgaattatttaagccatgaaggtggttcgctctctaacccaacggctgagcacttcctgccgctgctctatattctgggggcgtgggatggtgaagagccgataacgatcccggtcgaagggatggaaatggggtcgctgagcatgctatcggtggtggtaggcgaggcgtaacatcacacatgaaaaaaccccggccactcaggttgccggggtttgccgttattcgacgaaaatgtgcggatagaaacgcgaaagatcctgggtgatcagcgcccgatcttcacggatgccgatcccggcaggctggtcgttaataagccagctgccaatcagcgtatagctatcgccaaatttcggcagcggataaaactcctgcacgatggtgccttcttccccgtagggaccttccaccgcctccaccactttgccattttcaacgatcgacacgttggcgccttcgcgggagaagatcggcttaatgacgtacttctcaagctgcggatggttatcttcgctgaagtaagccgccaacaggttagggtggttggggaacatttcccacagcatcggcagcagcgccttgttggagataatgctcttccacgccggctccagccagcgtacgccggcgtcttccagcttggtggagaacatctcgcgcagcataaattcccacggatagagcttaaagagattgccgatgacctgatcctgtaaatcagtaaactgacctttctcgccaagaccgatatcttcgatatacaggaactcggtggcgatgcccgcttctgccgcacagtcctgcagatactgcacggtgccgcggtcttcaacggtatcgcggcagcaggccatatgcagcagctggaagccaaactgttcacgcagctcgccgaagcgttcaatcagcttttcctgcaggctgttgaactgatcgctgtcggcaggcagattaccggcgttaagctgatcttccagccagatccattgaaagaacgctgcttcatatagcgaggttggcgtatccgcgttgttttccagcagcttcggttcgcccacgccatcccaggccagatccagacgcgagtacagcgacggctggttggttttccacgactgacgcacaaagccccaggtgtgcttagggatgcggaatttggtcatcagctcgtcgctggcgatcactttctcaacgacctgtagacacatttgatgcagctcggcggtgaccgcttcgagcttttcaacctgcgccagcgtcagcttgtagtaggcctcttcgctccagtacggctcgccgtacatggtgtgaaagttgaagccatactcggtcgctttctcgcgccagtccgggcgctcggtaatgctgattctttccatgccgcttaaccgcccatcgagcgtgaagaggagctggagcccgcggcgctacgctgcatcgtcgattgcttagcgacggattcgccgaaaccgccgcgggtgacggtcgtggtggtggccggtttcggcgccatcgcggttttcggcacgttcatggtacggcccggttgcgccgcgccatagctcttaccgctggcatcggtgtactggccgtaggccgggctggccgggttcttcgagctaaacagcggctgctgcgcggccatgccgccgcccatcaggcgacccatcatgtagccggccatcagtggcatccagaagctgccgctgctttgcgcctgcgcctggttttccggggcgacgcccgcctgagccggcgcctgctggcattggccttcgccgaactcggcgacgcagtcttcacggctggcgtatttcggcgcggtgcgcgcggcttctttcaccgcgttattgtaggcggtggtgcactctgcggctttgcttgggttagccgcggagcagtcatcggcgttctgatacagagaaaccgtctcgtcagttttttcacaaccggcgagcataaagacggcggtgacggcaagggcgaccggcgtcaggtggcgagcgctccagcttttgcggaacgacgcatgattaatattttttgtccgtttcatatttgtcttccaggacccagtggtagtgcgtttgtcaacgctcaggatagagtatgagtggtggaaaatgaagcgaaagaggggaaaagcgggggtctttacgttgtcttacgttttacgccccgcctgacccgaaggccagacgaggcgtcatcgcgttcaacgattagtggctaaacggattagaaccgctggtcttcgtcgtacgggcggcagccggctgtgcggaagcggtgttcgcataaccgtcagcggcggcgtcctgctgcggattttccggcgcgacgctgtccggtgaagtcggaatcgctttacccagcgtgttgttcagcgcgatcagatcctgctcgttcagcgtgccgagagcggacttgatgttcagctcgttgatcaggtagttataacgggcgttggagagctgctgcttggcgttgtacagcgtggtggtcgcatccaacacgtcaacgatggtacgcgtacccaccgaataacccgcttccatcgcatccagggagctctgcgcagagacaacggcctgtttgtaagcattgatgctgctgatggaggcattcacgttgttaaacgacgaacgcacggtctgcacgacgctgcggtgcgcgctttccagctgctcgctggcgccgacaaagttgtattgcgcctgtttcacctgtgagttaaccatcccgccctgatacagcggcagggtgaagttcaggccgactgtgttttgcccgatatcagcgtccggggagatgtttttggaaccgctgtaacggttattagagacactggtggaagcgttcaaatcaagagtaggtaaatgaccatcctgcgcctggcgaatctgctcacgcgccagatcctgattcagacgcgcctgcagcagcgacaggttacggttttccgcttccttcagcagcgcgttcaccgcctgcggtttgctggttttgaagccgttaacgttcagcgacgccagctccggatagtagttgccggtgacctgacgaagctcttcaacggcgttgtcgaggtcgttacgcgcggtcacttcatttgccagcacggcgtcgtattgcgagcgggcgttttgtacgtcggtgatggcaaccaggcccacgttaaagcgctgggtggtttgatctaactggcggtagatggcctgtttctgggcttcggtataggagagcgtatcgatagcggccagaactttaaagtaagccgtcgcggtattcagaatcagcttttgctggtcggtctgataggtgacatcctgaatgcccgccgttttttcctgcagggttagcgcgcgccatttcgacatatcgaacagggtttgcgttaattgcagtgaaccgctggtgacgttggagttccggtctttgtaatcacggaatccgctggtataggtataatccgcgcccagaccgagttgcggcagtaatgggcttcgcgcttcgttgatcttttcgaatgcagcatcgcgatcggctgccgatttacgcaggtcagggttgctaatacgcgcctgctgataaacctgcaacaggttctctgcctggctcatggcgctgaagccagtcaggcccaggccgataaggatgggaaaaagtttcttcatttgcattccttgttgtgaagcatttagcgctactcaaattctaaaaataatcgctgattgtatcgactctgtcgccgtaaaaagttggcgttacgtgccatagggcggtaatttgcaccaatctaacatacaggctgtaaaacggtagccaaacggcctataaatccctactttcggatgagcaggacacagacaatgagcaaacctaatcagcagggaattaccttctctaaaaacgatgtagaaattattgcacgggaaacgctctatcgcggttttttttcgctcgatttgtatcgttttcgccatcgcctgtttaacggcgggatgagcggcgaggttacccgcgaaatttttgagcgcgggcacgccgccgtcttgctaccctttgacccggtgcgtgatgaagttgtgctggtcgagcagatccgcattgccgcctatgataccagcgagagcccgtggctgctggaaatggtcgccgggatgatagaagaaggcgaaacggtagaagatgtcgcccgccgggaagcgctggaagaggccgggcttgaagttgggcgcaccaaaccaatattaagctatctggcaagcccaggcggcaccagcgagcggttatcgatcctggtgggcgaagttgatgcatcgacggcaaaaggcattcacggcctggccgaagaaaacgaggatattcgggtgcatgtggtgagccgggaacaggcttaccagtgggtagaagaggggaaaatcgacaacgcggcttctgtcatcgccctgcaatggctgcagctgcattatcacagcttacgaaacgagtggaaataatatgaagcgttatacacctgacttcccggaaatgatgcgcctgtgcgaaaccaatttcgcccagctgcgccgcctgttgcctcgcactgaggcggtcggcgatatggcgaactatcaggtgggggcggcgcaatatcgattaacggtggtcgaatcgacccgctacactacattagtgacaatagaacagactattcctgcggtgagctactggagcctgccgtcaatgacggtgcgcctgtatcacgacgccatggtggctgaagtgtgttcaagtcagcagatttttcgcttcaaagcgagatatgattaccctaataaaaagttgcatcaacgcgacgaaaagcatcaaattaatcagtttctggccgactggctgcgttactgtttagcacatggagcgatggcgattccggtttgttagcgtcgtgaaacctaaggacaccatttggaaagcctgttaaacctacctctggctggtgagaccagagtcaggatattacaaattactgatactcacctgtttgctgaaaaacatgaaacgctgttgggtatcaatacctgggaaagttatcaggctgtattggatgcgatacatgcctcacagcgtgaatgcgacctgattgtagcaacaggcgatctggcgcaagaccactctgccgcggcctatcagcatttcgctgaaggcatcgcgagctttgccgcaccctgcgtctggctgccgggaaaccatgatttccaaccggcgatgtacagcacgctgcacgatgccggcatctcccccgcaaaacgcgtcctgttgggcgatcattggcaaatcctgctgctggacagccaggtctttggcgtgcctcacggcgagctgagcgatttccaactggagtggcttgagcatcaattgaatgcggaacctgagcgctacacgctgctgttactgcatcatcatccgctgccggcgggctgcagctggctcgatcagcatagcctgcgcaacgccggggcgttagaccacatcctgagcaactatccgcgggttaagcacctgctatgcggccatattcaccaggagctggatctcgactggaacgggcggcggatgatggcgacgccatcgacctgcgtgcagtttaaaccgcattgcgctaatttcaccctcgataccgtctctccaggctggcgctggcttgaactgcatcctgatggcgtgttgacgactgaagtctgtcgtctcagcggcgccgagtttcacccggatatcgcttcagaaggatactgatgtctactcttctttatctgcacggatttaacagctcgccgcgctcggcaaaagcgacggcgctgaaaacgtggctggcgcagtaccacccggaaattaacatggtggtgccggaactgcctgctttcccggcgcaggcggcagagatgctggaagccatcgtgctggagcacggcggcgagccgttaggcgtggtggggtcgtcgttgggcggctactacgccacctggctgtcgcaatgttttatgctgccggcggtggtgattaacccggcggtgcggccatttgaactgctgaacaattttcttggccccaatgagaatccgtacaccgggcagcaatatgtgctagagtctcgccatatttacgatcttaaagtcatgcatatcgacccgctggaagcgcctgaccttatctggttattgcagcaaacgggcgatgaagtgcttgattaccgccaggctgttgactacttcgcctcctgccgtcaaacggtcgaggagggcggtaatcacgcatttgttggctttgaagatcatttcacccagattatcgattttctgggcctgcgctaagcggttcagaacgacctacgaatacacaccatgacgcaatcttcatataacgctgatgccattgaggtactcaccgggcttgagccggttcgccgccgcccgggaatgtacaccgacacaacccgtcctaaccatcttggtcaggaagttattgataacagtgtggatgaagcactggccggccacgccaaacgcgtggaggtcatcctccatgccgatcaatcgttggaggttatcgacgacgggcgcgggatgccggttgatatccacccggaagaaggggttccggcggttgagctgatcctttgtcggctgcatgcgggcgggaagttttctaataaaaactaccagttctccggcggcctgcatggggtggggatctcggtcgtcaacgccttgtctaagcgcgtggaagtcaacgtgcgccgcgatggtcaggtctacagcatcgcctttgaaaatggggaaaaagttgaagacctgcgcgtcaccggcacctgcggtaaacgcaacaccgggaccagcgtccatttctggcctgacgaaagcttcttcgatagcccgcgtttctccgtctcgcggctaactcacctgttaaaagcgaaagcggtgctgtgcccgggcgtggaaattgtgttccgcgaccaggtaaacaacagcgaacagcgctggtgctatgcggacggccttaatgattatctgtgcgaggcggtcaacggcctgccgctgctgccggaaaaaccgtttgtcggcaacttctccggcgaaacggaagcggtggattgggcgctgctgtggctgccggaaggcggcgaactgctgaccgaaagttacgtcaacctgatcccgactatgcagggcggtacgcacgttaacggtctgcgtcaggggttgctcgacgcgatgcgcgagttttgcgaataccgcaatattctgccgcgcggcgttaagctgtcggcggaagatatctgggatcgctgcgcgtacgtactgtcggtgaagatgcaggatccgcagttcgccgggcagacgaaagaacgtctgtcgtcgcgccagtgcgcggcattcgtctccggggtggttaaagacgccttcagcctgtggctgaatcagaacgtacaggcggcggagctgctggcggaaatggccatttccagcgcccagcgtcgcctgcgcgccgccaagaaagtggtgcgcaaaaagctcaccagcggcccggcgctgccgggtaagctggcggactgcaccgcgcaggacctgaaccgcaccgaactgttcctcgtcgaaggggattctgcgggcggttcggcgaaacaggcgcgcgaccgtgaatatcaggcgattatgccgctgaaaggcaagatcctgaacacctgggaagtctcttccgatgaagtgctcgcttcgcaagaagtgcacgacatttcggtggcgattggtatcgacccggatagcgatgacttaagccagctgcgttacggtaaaatctgtattctcgccgatgccgactcggatggtctgcacatcgctaccctgctgtgcgcgctgttcgtgaagcatttccgtaccctggtgaaagaggggcacgtgtacgtcgcgctgccgccgttgtatcgtatcgacttgggcaaagaggtttactacgcgctgacggaagaagaaaaagccggcgtgctggagcagttgaagcgtaagaagggcaagccgaacgtacagcgctttaaagggctgggcgagatgaacccgatgcagctacgtgaaaccacgctcgacccgaacacccgccgcctggtgcagctcatcatcaccgatgaagacgagcagcaaacgaccgcggtgatggatatgctgttggccaagaagcgttcggaagaccgccgcaactggctgcaggaaaaaggcgatatggcggatctcgaagcctaagccgacgtcagccgccagatgcgaaaaagggagcctctggctccctttttacttcttacttctgtcgggcttatacgccagcctgcagaatgcggatgctggtttccagcacgtcgccttttaccgcttcggcgtaagccttcatgtgcggcgtttgcagatgcgcttcaagatgcgcgacgctttcccactgctcgaccataacgatcgaatccggggcggaggtctgaaaactcacgcctgcggcgtggtcaaccagcggcgcgtagccgtggcagccttcttcctgcagtaccacagggacaattttagcgaactgatccagtaccgcctgacggtggtgttggcccggacgagtacgaatttcggcaatcactgttaacatggttaactcaactccttctgtgtgtagacttctagttaaccaaaaatcccggccagatgcttgcgatattctgcgatgacgtgtggaacgtcaggcattttaatcacgtcgttggcgataaaggtcggcatcgcgctcatgccaaggaactgattggctttgtgaaacggcaggtaaacgccatcaacgccgacgccatggaagaactgatctttatcggtgaaagcttccatcggcgcattccaggtcagcgacagcatatactgtttgccctgaatcaacccgccggagccatattttttgctgtcatcggagcgggtacggccatcgctggcgtacagagaaccatggccttcggtgaagacgtcatccatatactttttcacggtccagggcgcgcccatccaccagcccggcatctgccagataaccacatcggcccacaggaaattctgcacttcttcttttacatcgtactcgctctccgcgcggacgattttaacatcatgcccgaggtcgcgcagataaccatccgcgacctcggtcagggtgtcgttcaattggccattagagtgagcgaattttttcgccccgttgataatcaggatgttgctcattttttgccctcaacctattaaatttgtcagcaattttaccccgcgaagcggggcagtaaaatgagcaaaatgtgcaaagtcttttgcatttttggcaataatgtggctaccagtaaacgcgcgcctcaaagccgccgtcgcgcgcgttagcaaaatcaacccgcatgccgtgcagtgcggcgatgcggcgaacgatcgataagcctaatccgctgccgggggcatcctggcccggcgggcgataaaaacgctcgccaatgcgcgccagcgcttgcgggctaatgcctggaccattgtcgcgaacccggaattcgcgggcggaaagggtgatatccacccggctaccgcgcgggctatagcgcacggcattatccagcagattgcgtaccagcaggctgagcagcagcggctggccggtgcggacgatattgctggcgttcagatgcaggcgtaactcaatggcggactgctgcgcgtggtgatacatctccattacagccgactgcaacaggtcgtcgatggcgaccggctgcacgtcatccagttgcgcaagggaatccagccgcgacagcgtaagtaattgatcgaccagccgagtggcgcggtcgatgccctgatgtaattgcgccaacgctttatcccggccttcgggatcgtccattgaaagctgggcgacttcggtttgcaccttcagcgccgccagcgggctgcgcaactcatgggcggcatcagaggtaaagcgacgctcgcgtagcatggtttcgtgggtacggctgaatagctgattcagggcatcgaccagcgggcgaacttctgaagggattttgtcgtccgacagacgttccgccgaatccggcgcgcgctggcgcagggttcgagccagtttcttcaatggcgccagctcacggcttaatagcacgatgagcagcacgaacatcagcggtagcgcgaccagccacggcgtgagctgcgaggtaacgatatccatcgccatttcccggcgataatcccactcctggccgacggcgatacgatggcggccgtcagcggtggtcagccacagaaaacgccattcgtcgtcatcgccgcgcaggtagccgtcgctgaagccttcgcgctgcgaaccccattgaatatcttcgccgttttcaccatcgttaagcaccatttttccgtcgtgggtgaaaatagcgaaggccagcgcgtcatcatcaagatggccgtgtttaacttttttcttttcgcggatctgcgccggccgcgcctgcagctcatcgacattcatggcgctcaggcggcgggcgaagagcagttgttgggtatcaaacagcttatccagcttttcgctggtctgctgccaggcgatcacgctggcaatcccccaggcggcgctggtgagcaggacaaacagcagcgtcaggcgcaggcgcaggctcagacgggcgagtcgtttcatgcgtcacccagggtatagccgatgccgtgcacggtgcggataaaaccgctgccgagtttgcgccgcagatggtgaacgtgaacttccacggcgttgctggagacctcgtcgtcccagttataaagcttttcctcgataagcttacgcggcaatacgcgccccgcgttgcgcataagcagttccagcagggcgaactccttcggcttcagcgccaggctttcgccatcaaggctggcggttaagcggttcgggtcgagggtcaccttaccgtggcgtagctcgctgctgctctggccgtgagcgcggcggatcagcgcttcgagacgtgccgccacctcaatgagggcgaagggtttacacagatagtcatcggcgccgagctgaagcccttcaacccgctggctaagcgcgtcgcgggcggtgaggatcagcacgggttcattacggcctttatcgcgccattcgcgcagaatatcgaggccgtcaatgccggggagagtaaggtcaagtatcgcggcatcataaggggcgctatataaggcgtttttgccctcctggcctgcggtaaaccagtcgatgctgaagcccattttgctcagcccggctttaatgccgtcaccgatcagtttgtcatcttccaccaataatatgcgcatgtttccctccgacgatcccgtttctttgcgcagtaaaccgcgttgatgcaggggatgtacagcattaaaatttcttttttccgcttaagaagtcgttaagttttgtcaggcgtaataggagccataccaacacataagggagattataaaatgaaaaaaattgctgcgatgaccgctattattgctttggtttccatgccggtactggccgccgggcagggtggattcaccggaccgtctactaccactacctcgcaggccggcggcttcaccgggccgagcggcgcggtgaccaccgtggcgaacgccaagtcgctgcgcgatgacacctgggtgaccctgcgcggtaaaatcgtcgagcgcatctctgatgatctgtataaattccaggatgcctccggcgtggtgaacgtcgatattgaccacaagcgctggaacggcgtgaccgtcggcccgcaggatacggtagaaattcagggtgaagtcgataaagactggaactcggtagagatcgacgtgaagcagatccgtaaaatcacgccataatgcccgcgcggcctacgactggctacccgcttccggggagacgcgaagtgattttccggtgttcttccgctacctcaattttgtgcatgaagttggcgagcatgaactccgcaccgatatttatttgccgctagcctgattgatatcctcatcctctttaaccgatctcacttcctgtgactcagggcgtgagatcgggtattatcgcgggtagttttgccgccgcaatggccgcgtcccagattgaggatccacgattaatgagcgatatggcagagcgcctcgcgctacatgaattcacggaaaatgcctacctgaactactccatgtacgtcatcatggacagggcattaccgtttattggcgatggcttaaagccggttcagcgccgcattgtctatgcaatgtccgagctgggcctgaacgccagcgccaagttcaaaaaatccgcccgcaccgtcggcgacgtgttgggtaaatatcacccgcacggcgacatcgcctgctatgaagcgatggtgctgatggcgcagccgttctcttaccgctacccgctggtagacgggcaggggaactggggcgcgccggacgatccgaaatccttcgcggcgatgcgttacaccgaatcccgcctgtcgaaatacgccgaactgctgctcagcgaactgggtcagggcaccgtcgattgggtgccgaactttgatggtacgctgcaggagccaaaaatgctgccggcgcgtctgccgaacatcctgctgaacggcaccaccggcattgcggtcggtatggctaccgatattccgccgcacaacctgcgtgaagtggcgcaggcggcgattacgctgctggaaaaaccgaaaaccacgctcgatgagctgctggatatcgtgcaggggccggactacccgaccgaagcggaaatcattaccccgcgcgcggaaattcgcaaaatctaccagaacggccgcggttcggtgcgcatgcgcgccgtgtggacgaaagaagacggcgcggtggtgattagcgcgctgccgcatcaggtgtccggcgcgcgcgtgctggaacagatcgccgcgcagatgcgtaacaaaaagctgccgatggttgatgatctacgtgatgaatcggatcatgaaaacccgacccgtctggtgatcgtgccgcgttccaaccgcgtggatatggagcaggtgatgaaccacctgttcgccaccaccgatctggaaaagagctaccgtatcaacctcaacatgatcggcctggacaatcgtccggcggtgaaaaacctgcttgaaatcctgacggagtggttgaccttccgtcgtgataccgtgcgtaaccgcctgaactaccgtctggaaaaagtcctcaagcgcctgcacatcctcgaaggtttgctggtcgcgttcctcaacattgatgaagtgattgagataatccgccacgaagatgaaccgaagccggcgctgattgcccgcttcggcatcagcgaaacccaggcggaagcgattctggaattaaaactgcgtcatctcgccaggctggaagagatgaagatccgcggcgagcagagcgagctggaaaaagagcgcgatcagctgcaggcgattctggcctccgaacgcaagatgaataacctgctgaagaaagagctgcaggccgatgccgatacctttggcgacgatcgccgttcgccgctgcgcgagcgcgaagaagcgaaggcgatgagcgagcacgatatgctgccgtccgagccggtcactatcgttctgtcgcagatgggttgggtgcgtagcgccaaaggccacgatatcgacgcgcaggggctgagctacaaagccggcgatagctggaaagcgtcggttaaaggcaagagcaaccagccggtggtgtttattgataccaccgggcgcagctacgccatcgacccgattacgctgccttccgcccgcggccagggcgagccggtcaccggtaaagtgacgctgccgccgggcgccagcgtagaacatatgctgatggaggcagacgatcagaggctgctgatggcctccgatgccggctacggtttcgtctgtaccttcaacgacctggtggcgcgcaaccgcgccggtaaggcgctgattacgctgccggacaacgcgcatgtgatgccgccgctggtcattgaagacgatgccgatatgctgttggcgattacccatgccggacgcatgctgatgttcccggtgagcgatctgccgcagctgtcgaaaggcaaaggcaacaagattatcaacattccgtcggcggaagccgcctccggccaggatggtctggcgcacctgtttgtcctgccgccgcagagcacgctaactatccacgtcggcaagcgtaagatcaaactgcgtccggaagagctgcaaaaagtcaccggcgagcgcggccgtcgcggttcgctgatgcgtggcctgcagaaaatcgaccgcgtggagatcgactccccgcgccgcgcctcagctggcgacagcgaagagtaagatccgcatccttcacccggctggaggatgcgaaaatttgccgcaaaatcgttgtttattcaggcattgcgattaacatgtcctccaggggcggagattttccgccccgcgttgagagggcagcggtgtcctgagcctgtgattcaacgggtataacgctaagcggtttgggtttcagaggaagctatgttatttatttttcgactaatttttgttgtcatttattgcatcgtcgtgtgcatatttggcagtctttactgcttgttcagcccgcgcaaccctaagcacgtcgcgacgtttggtcatctgtttggccgcctgtccccggtatttggcctgaaagtcgaactgcgtaagcctgcggacgcggaaagctacggcaatgcgatctacatcgctaaccaccagaacaactatgatatggtgacagcgtcgaacatcgtgcagccgccgacggttaccgtgggtaaaaaaagcctgttatggataccgttctttggccagctttactggctgacgggcaacctgctgattgaccgcaataaccgaaccaaagcgcacggcactattgccgaagtggtgaatgcgtttaaaaagcgtaaaatttcgttctggatgttcccggaagggacccgcagccgcggccgcggtctgctgccctttaaaaccggcgcgttccacgcggccatcgccgctggcgtaccgattattccagtatgcgtgtcgaatacatcgaacaaaattaaactcaatcgctggaacaatggtctggtgattgtcgagatgctgccgccggtcgataccagtcagtttggtaaagataacgtgcgcgcgctggcgacacactgccgcgagatgatgtccgctaaaatcgccgagctggataaagaagtggccgagcgcgaagcggctggaaagaaataatacaggaaacgccgcgaacgcgagcgtattgctggcgggaaacgaattccctttttgcattgtcagtatttcatggagttaatatgtcactcagtcggcgtcagtttattaaggcttcaggtgtagcgctgtgcgcgggcgccgcgccgctgaaggctcatgccgccggccagcagccggtgctccccattccgcctctgctggaatcccgtcgcggtcaaccgctgtttatgaccctgcaacgttctcactggtcattcacccagggaacgcgcgcgccggtatggggcatcaatggccgctacctggggccgaccatccgcgtctggaatggtgatgacgtcaaacttatctacagtaaccgcctgaccgaaaatgttgccatgacgattcgcggcctgcaggtgccggggccgctgattggcggcgcggcgcgcatgatgtcgccgaatgcggattgggcgccggtattgccgattcgccagagtgcggccactttgtggtatcaggcgaataccccgaaccggatggcgaaacaggtttacaacggcctggcgggaatgtggctggtagaagacgaggtcagcaaaaacctgccgatcccgaaccactacggcgttgatgacttcccggtgattattcaggataagcggctggataacttcggcactccggaatatagcgaaccgggcagcggtggtttcgtgggcgataccctgttggtcaacggcgcgcaggggccctatgtcgaagtctctcgcggctgggtacgactgcgtctgctgaacgcatctaactcgcgccgctatcagctgcagatgagcgatggccgcctgctgcacgttatctcaggcgatcagggcttcctgccggcgccggtctcacttaagcaattgtcgctggcccccggcgagcggcgtgaaattctggtcgatatgaccaacggcgatgaagtgtcgattacctgcggcgaagcggcgagcattgtcgaccgtatccgcggtttcttcgagccgtcgagcattttgatctccacgctggtgctgacgctgcgtccgaccgggctgctgccgctggttaccgacagcctgccggtgcgcctgctgccgaccgagctgctctccggtacgccgctgcgcagccgtgatattactcttggcgacgacccaggcatcaatggccaactgtgggatccgcagcgcattgatatcaccgctcagcagggaacgtgggagcgctggaccgtgcgcgccgaccgcccgcagtcgttccatattgaaggcgtgatgttccagatccgtaacgtcaacgggaccatgccgttcccggaagatcggggctggaaagatacggtgtggattgatgggcaggtggaactgctggtgtattataaccagccttcctggccgcacttcccgttccagtacctgagccagacgctggagctcgccgaccgcggctcgattggccagatcctggtgaatccagcgccgtaatatccgcaaccctggccgcaacccggtcagggtttgagaatatcctccttcatttccactatcattccggcttataatccacgccctttttggttatttttttatcattttccccggaagcaatatgagcgcaatatccctgatccagccggatcgtgacctattttcctggccgcaatactgggctgcctgttttggccctgcgccatttttaccgatgtcgcgtgaagagatggatcaacttggctgggatagctgcgacattattctggtgaccggcgacgcctacgtcgaccatccaagtttcggcatggctatctgcggccgtatgctggaagcgcagggattccgcgtagggatcatctcccagccggactggaacagcaaagaagacttcatgcgcctgggtaagccgaatctgttcttcggcgtcactgcgggcaatatggactcaatgatcaaccgctataccgccgaccgtaagctgcgtcatgacgacgcctataccgccggcaacgtcgcgggtaagcgcccggaccgcgcgacgctggtctatacccagcgctgtaaagaggcgtggaaagacgtgccggtgatcctcggcggtattgaagccagcctgcgccgtaccgcgcactacgattattggtccgataccgtacgccgctcggtgctggtggattcgaaagccgatatgctgatgttcggcaatggcgagcgcccgctggtagaagtggcgcatcgtctggcgatgggcgaggccatcggtgatattcgcgatgtgcgtaataccgcgatcatggtaaaagaagcgttgccgggctggagcggcgttgactccacgcgtctggatacgccgggcaaaatcgacccgattccgcatccgtacggtgaagacctgccgtgcgccgataacaaacccgtgcccccgaaaaaagccgaggccaaagccgttgtcgtgcagccgccgcggccaaaaccgtgggaaaaaacctacgtgttgctgccatccttcgagaaggtcaaaggcgacaaagtgctctatgcccacgcgtcgcgcattctgcaccatgaaaccaaccccggctgcgcccgcgcgctgatgcaaaagcacggcgagcgttatatctgggttaacccgccggcgatcccgctgtcgaccgaagagatggacagcgtctttgcgttaccgtacaagcgtgtgccgcatccttcttatggcgatgcgcgtattccggcctacgagatgattcgcttctccattaacattatgcgcggctgtttcggcggctgttctttctgctcgatcaccgaacacgaagggcgcatcatccagagccgatccgaagattcgatcattaatgaaatcgaagcgattcgcgacacggtccccggctttaccggcattatttccgatcttggcggcccaaccgccaatatgtatatgctgcgctgtaaatcgccgcgcgccgagcagacctgccgtcgtctctcctgcgtctacccggatatctgcccgcacatggacaccaaccatgagccgacgattaatctgtaccgccgcgctcgtgacctgaaaggaattaagaaaatccttatcgcatcgggtgtgcgttacgacatagccgtagaggatccacgctatatcaaagagctggcgacccaccacgtcggtggctatctgaagatcgctccggagcataccgaagaggggccgctgtcgaagatgatgaagccgggcatgggcagctatgaccgctttaaagaattgtttgatacctattcgaagcaggcgggtaaagaacagtacctgatcccgtactttatttccgcccacccagggacgcgcgatgaagatatggtgaacctggcgctgtggctgaagcgtcatcgcttccgtctcgaccaggtacagaatttctacccgtcgccgctggcgaactcaaccaccatgtattacaccggcaagaacccgctgggtaaaatcggctataagagcgaagatgtggtggtgccgaagggcgacaaacagcgccgtctgcataaagcgctgctgcgctatcacgatccggcaaactggccgctgatccgtcaggcgctggaagcgatgggtaaaaagcatctgattggttcacgccgtgactgcctggtgccggcgccgacgctggacgagatgcgtgaagcgcgtcgccagaaccgtcatacccgtccggcgctgacgaagcatacgccggttgcgcatcagcgccagacgccagccgcctcgggggcgaaaaagcgtatcaagccgaagacggcgtcccgctaagccgcttccccggcggttccgatcgccgggggaaagcctgtcacataaggagagagaacgataatgacgccggtaatcctgtcacgacagcagctggataggttgtgggagatagaccgcagcgaaattatcgacaccctttataagctcgataatggccggcttcaggcgtacccgcagtattatgatgtgcgaggttgggatcctcacgatcgccaggtttatacgcctattcacgaggcctgctacgatcgcggcggtatatttttcgcctttttcgagcagaataaaatcatcgccgcggcggcgatggataccttgccaaggggtgaaaagggcgatctgcgccaactgttattcttttatgtgggcgcagcgcagcgcggccagggatgggggcgacgtctgtttgactatgcgctgcagcagcttcctgctcttggcgcatccggcctgtatatttcgtccatccccaacaaaagcaccgttgatttttatctctcacagggctgtcgtttaattgataagcccgacccggagctgtttgctctggagcctgaggatattcatttaatttgcgaaagcctttagcgccgcgcggcgctaaaggcaaaagttaaggggattaaccgccgaactgatccgggtcggggccgagacgtttgccctggtccagcttagcgatttcactgagttcgtctttgtcgagacggaagtcccagacgtcaaagttttccgcaatacgcgatggcgtgacggatttcgggatcaccaccagtccgctgtcgagatgccagcgaatgacgatttgcgctggcgttttgccgtatttatccgccagatggtgaataattttctgatcgaagacccctttgccgccctgcgctaatgggctccaggattcggtctggattttgtgggtggcgttccatgcatgcagttgacgctgctgcattaacgggtgcagctcaatctggttaatcaccggagcgacgccggtttcatcaatcagcttttgcagatgcggcacctggaaattacataccccaatgctttttgccagcccttgctgctgcaattcgatcagcgcctgccaggcttcgacgtaatggcctatcgctggcaccggccagtgaattaaatagagatccacatagtccagtttcagcttgctcaggctctcttttagcgcttcatgcggccgtttttgatcgtcgttccacagtttggtagtgatgaagagctcatcgcgattgacgcccgcgctgcttaacgcgttgccgacgccagcctcattttggtacgcggcggcggtgtcaaaagaacgataaccgacttccagcgccttatgaatggcggagacgacttcctcgttgcctgctttccacacgccgagacccaactgcggcatcaggttgccgtcgtgtagttttataacggttggatgtgtcatgccttcctcctgttaatgaactcagcgtgaaaaatccgccgaggggtagcattaagtctggacgaaatagctaaaaacggtagtaaaaacacctctccccggcgtttgtttaacgtaaggagaggtgaatcaggcggggataacttagcgggcagcctcgtaaatacggcggctgacgtccagagtgatatcctgattttcgccaagtttagtcatgccgtgctcttccagtttcgccagcagcgccgggatggagctaccgtcgagaccgtaatcggaaaggcgagtcggcacgcccatctgctcgaagaaactccgggttgcggcgatagcggcatcgatacgttgctcttcggaaccttcggtaatattccacacgcgctcggcgtactgcagcagcttagcgcgcttggtatcgcgtttctcattccacagcgccggcagcacgatagccagcgtctgagcgtgatccaggccgtgcatcgccgtcagttcgtggccgagcatatgcgtcgcccagtcctgagggacgcctgcgccaatgaggccgttcaatgcctgcgtcgccgcccacataatgttggcgcgcacgttgtagttctccggctcctgcagcgctttcgggccatcttccaccagcgttagcagaatgccctcggcgaaacggtcctgaattttaccatcaaccgggtaggtcacgtactgctcaacggtatggacgaaagcgtcaacgacgccgttagcgacctggcgtggcggcagggtgtaggtataaacaggatcgaggatcgcaaagaccggctgaacgtgttcggacataaacgcgcgtttatcgccggtggttttacgcgagataaccgcgcctttatttgattcggaaccggtcgccggcagggtcaatactgagcccatcggaatagcgcgggtaatcttgctgccgtaggtttccagaatttcccacggatcgatattcgcgtcatagtgcgcggccgcggcgataaatttggtgccatcgagcaccgaaccgccgccaaccgccagcaggaaggtcacgttctcttcgcgggcgagttttaccgcgttcatcagcgtttcgtaagacgggtttggctcaatcccgccgaattccagcacgtcaaagccagccagcgcgctcagtacctggtccagtacgccggttttcttcacgctaccgccgccgtaagtcaccagcacgcgagcgccggctgggatttgttcgcgcagctcggcgatggcgcctttgccgaacagaatgcgggttggggtatgtaaattgaagttattcatggctggtgccctcataaagatgaaactcccggcagaaaggacgactctctacccgatggcggctattgtgttcctgcgaccgtttcctctcaatgcacattcctgccattgtcttgcccatttctccattgggctggagaaaaagaaggaaactacgcacaataagcttgtagaaaagtcgtcggagaagcagcgaaaatgaaccgtgccgagatatgccagctattaacagataaagttaacaatctgaaagataagcaagaaatgctaagtgaactgctgccggatatccgtctgctgtacgggacgcagccgggcacccgtacgccggtgatgtaccagccggggatcgtttttctcttttccggccataaaattggctatatcaatgaacgaaccttccgttatgacaccaacgaatacttactgttaaccgtcccgctaccgttcgaatgcgaaaccttcgcgactccggaagtgccgctggcgggaatgcggctgaatgtcgatattttgcagttgcaggagctgctgatggatatcggcgaagatgagctttttcagccgtcggtcgcctccagcgggatcaactcggcggtgttatcggaagagatcctctgcgcggcggaacgcctgttagacgtgatggagcgaccgctggacgcgcgcattctcggcaaacagattatccgcgagatcctttatcacgtcctgattggcccctgcggcggcgcgctgctggcgctggtcagccgacagacgcactttagcctgattagccgcgttttaaagcgtattgaaagccagtacaccgaaaacctcagcgtcgaccagctggcggcggaagcgaatatgagcgtctcggcgtttcaccataactttaaatcggtcaccagcacctcgccgctgcagtatttgaagacctatcgcttgcataaggccagaatgctgatgatccatgacggcatgaaagccagcgcggcggcgatgcgcgtcggctacgaaagcgcctcgcagtttagccgcgagtttaaacgctatttcggtattacgccgggtgaagatgccgcgcgtattcgcacgatgcaggggatttgataaggatgcggcgcctgtagccccggtaagcggtagcgttaccggggatttcgaggccatccggggcgagtgaatcaggcgctgcagtatttcttcttgataaccacaataaccgtaccaacgaggccagtcaccagcagggcgatcggcagcaccatcaggcaggtcatgacctggtcttcgtggtttttcacgaacgggatcatgctcagcgcatagccaagaccggtgacgacgccaacccacagcaggccgctaagccagttaaagaactggaaacgacgattcggcaggccggaaatgcccgccatggttggcagcagggtgcggacaaacgccaaaaagcgcccggccagcagcgccagcaggccgtgtttatcaaacatgttggtggcgcgctggtgatatttgtgcggcagatgcgacagccagcctttcaccatattggtattacccagccagcgcccctgtaaatagctcagccagcagccgaggctggcggcggcggttaggatggcgagagtggggacaaaatccatgacgcctttagcgattagcgcgccggcgagcagcaacaggctatcgcccggtaaaaacgaagccggcagcagcccgttttccagaaacagggtcgcgaacatgaccagatatacaaaacccacaacgtgagggtttgccaatgcggcaaaatcatgttgccacagcgcggcgacaatctcttgaatgacaaccatggactttcctaagtggtaccgtttttcgactagtgtactcctgaagcggcccgagcaccttgatctcgggcgcaacaaaagcggccgcgtttctgaaagcgtccgcttttgttgccacttcctgtcactttacacgatacgcgcgaagcctgccgctaaatccgccagcagatcgtcaacattttctaaacctatgtgcagtcgaataagggtaccgctgaaatccacttccgcctcggggcggatggccgcgatatgttccggctggttggcgaggatcagcgattcgaacccgccccatgagtaggccatgctgaacagactgaagttgtccagataggctgccagctcggcgtcggtgaggcgcttattgagaacgaaagagaatagaccgctgctgccgctgaagtcgcgcttccagaattcgtggcccttgctgcccggcagcgccggatgattgacccgcgccacctgcggatgctgcgccagccattcggcgacgcgcagactgctttcgtgatgttggcgcaggcggacgccaagcgtgcgtaaaccgcggctggtcatataggcggtgtcggcatcgaccatctggcccattagataggcgttttcacacagttgctcccaacagcgggcgttggccactgcggtgccaatcattccgtcggagtggccaattaaatatttcgttgccgcctggatagagatatcgataccaaaatcgagcgctttaaacagcacccctgccgcccaggtgttatcgatcatgataatagcttccggcgcgacgcggcgcacggcggcgacgatggccggcacatcatgcacttccatggtgatcgagccgggggattcgaggaacaccactttggtattgggttgaatcagattggcgatatccgcgccgatgagcggatcgaaccagccggtggtcaccccgagctttgcgaggatcttagtgcagaagtcctggctgggttcataggcggtgttggtcattaacacgtggtcgccctgttcgacgaaggccagaatcgtgttggcgaccgcggccgcgccgcaggggaagagggcgcagccggcgccgccttccagttcgcacatggcttcctgcagcgaaaagtgggtcagcgtgccgcggcggccataaaacagctcgcctttggcgcggttacgggtggcgtgttttttagcctcgacggtatcgaacaccagcgatgaggcgcgctggatgacgctattcaccgaaccctgagtatattttttgcggcgcccggcgttgaccagcgcggtatcaagatgtttatcagccatgttctgcaaacctgtttttatacgtctggacgtctaaactaccatgaatcccggtttgtgtaccgggtcgtaaacgatacaggcaaaaattttcccgaaaccggcgtcagccgcttttttactgcgtaagcgcaaagaaaagaaacgtgatttgctgcacagtgtaaatactaatgagaaccactatcaattcgatgccgttttgatattattatgctcagtttttgtgattgatgtcctggagaaacagtgtgggtaataatttgatgcaggcggatctctccgtttggggtatgtatcatcacgccgatattgtcgttaaggttgtgatgattggcttgattctggcttcggtagtcacctgggctatcttcttcggcaagggcgccgaaatgttgtccagcaagcgtcgcctcaagcgtgagcagcagcagctcagcgaagcgcgttctctcgatcaggctaacactatcgcgaatggattccatgctaaaagcctgaccactcagttgattaacgaagccaataatgagctggaactgtcggcaggcgtggatgataacgaaggtattaaagaacgtaccggtttccgccttgagcgtcgtgtggcgcaggttggccgctatatgggccgcggtaacggttatctggcgactatcggcgctatttccccgttcgtcggtctgttcggtaccgtctggggcatcatgaacagctttatcggtatcgcgcaaacgcagaccactaacctcgcggttgtcgcgccgggtatcgcagaagcgctgctggcaacggcgattggcctgtttgccgcgattccggcggtggttatctataacgtcttcgcccgcatgattgccagttacaaagcgtctcttggcgacgtggccgcgcagattatgctgctgcaaagtcgcgatctcgacctgaacgccagtggttctcagccgctgcgtccggcgcagaaattacgggtaggttgatccgctatggcgatgcattttaacgaaaacctcgatgataacggcgaaatgcacgacattaacgtgacgccatttatcgacgtcatgttggtgctgttgattatcttcatggtggcggcgccgctggctaccgtggacgtcaaagtcaatctgcctgcttcatccagccagccgcagccgcgtccggaaaaaccgatttatctgtcggtgaaagcggacaaatcgatgttcctcggcaacgatccggtgactgaagagagcgtgattgcctcgctggatgcgctgactcagggcaagaaagacaccaccgtcttcttccgcgctgacaaaaccgtcgactacgagacgatgatgaaagtgatggatacgctgcatcaggccggatatctgaagattggtctggtgggcgaagagaccgtcaaagcgaagtaatttcccccaggatatcccccggaaggccaaccctgcgttggccttttttatttccccggcgcctgcgcatcgttttgatatgagccagctgcgatataatggcggccatttttacaaactgacaggaccttatggaacgctttctggaaaacgctatttatgcttcgcgctggctgctggcgccggtttatttcggcctctcgctgggccttatcgcgctatcgataaaattttttcaggagatattccacatcctgccgcatatcttcagcgtcagcgagtcggatctgattctgacgctgctttcgctggtcgatatgacgctggtgggcgggctgctggtgatggtgatgttttcaggttatgaaaacttcgtttcgacgctggatattaacgaaggcaaagagaagctcaactggcttggcaaaatggatgcgacatcgctgaaaaacaaggtggcggcgtcgattgtggctatctcttccattcacctgctgcgggtgtttatggatgcgaagaacgtgccggataataagctgatgtggtacgtcattatccatctcacctttgtgctttcagcctttgtgatgggctatctcgatcgcctgaccaaggtaaagcactgatgtgacaacttacccggcagctttgcgccgccgggtaaaggcattacgcctgacgtttgtcttcggtctgcgtgtcgaaatcgcgggcgtcatggcgctcgtgcaactgctcgtcgagcgggccattggtgcggttaaccatccgtccgcgcttcaccgccgggcgattgcccacgtcctgcgcccagcgcagcacgttaacgtagctgccggcatcgaggaattccgcggcgttatagacgttgcccagcaccacgttgccgtaccacggccagatcgccatatcggcgatagtgtactcttcccccgccacaaagcggccgcgcgccagctgcttatccagcacgtcgagctgacgtttcgcttccatggtaaagcggtcgatggcgtactcgatttttaccggcgcatagttatagaagtggccaaagccgccgccgaggaacggcgctgcgccctgtagccagaacaaccagtttagcgtttcggtgcgtccggccgggtctttcggcaggaagaaaccaaatttgtccgccagatagagcaggatgctgccggattcaaatacccgggtcggcggagtagtggagtggtcgctcagcgccgggatcttcgagttcgggttaacttccacaaagccgctggaaaactgatcgccttcgccgatacgaatcagccaggcgtcatactcagcgcctgcgacgcccagcgccagcagctcttccagcatgatcgtcactttctgcccgttcggcgtgcccagcgaatagagctggagcgggtgattgccaacgggcagcactttctcatgcgtcgcgccggaaaccggacggttgatattggcgaacgcgccgccgttattctgtttccattcccatactttcggtggttggtagtgattgtcggacatactgacctgcctctttggtaaggtgtacaaaaagtctagcagctaatctcaggccataatccgcgcggcccacacgctgacgtcatcgccgctgccgagatcgggctgcaccaggccattgaccataaacgtcggcgacacatgaatgccgttctggcgggcgtatttactgtgccatttgatctcgttttgcagctccggacgggcaaacgccgccgccagcgacacgtggctgtagcgctcaaggcgttcgataatttgctgcggggtggtattcatattcggcccgctgcagtggtcggtgaattcaaactcttcacgatgatcggcgaccgcctgcaggactttgtgcgcctgctctctgccgtgcggcagggtggaggcggccagcacgcagcgcactatcaccccggaaaacagatgccacggctgggactgcaggcgaatcttaatcgtgacgttctcggcgcccacttcatccagcaattcatcaagcttgttgaaggcgcgaacggaaaacggacaggttggttcgaggaatacttcaaaagtccgcggtccgtgtccccagaccagcggctgggcattgagatgcgaaggtgagctcattgtcgactcctgatgtagtgatgtttttttgttatgtgttggctaacaatatcacttctgccaatggacgccgggttattttctataagggcacgtttagcgaatcgaatgagtggtatcatcatttcacctctgtctggtaagtgcctgcggcaggataagaagagggagttttgttccgccaactgcccgggctgcattaatttgaggtcaggctaaatgagtaaaggatcgaccagtattgacgcccctttcggcacgcttttaggctacgcgccgggcggcgtggcaatttattcttcgaattacagtagcttaaatccacaagattatccggatgacgccgctttccgcagctatatcggcaacgagtatatggggcataaatggcagtgcgtagagttcgcgcgacgctttttattcctcacctacggttttgtttttaccgatgtcggtatggcttatgaaatcttctcgctgcgctttctgcgcgaagtggtgaatgacaacattcttcccctgcaggccttcgccaacggctcgcgtcgtccgccgatcgccggttcgctgctaatctggcagaagggcggcgagtttaaacataccggccacgtggcggtgattacgcaactggtggggaataaggtccgtatcgccgagcagaacgtcatccacgcgccgctgccgcagggccagcagtggacccgcgagctgacgctggaagtgaaagagggcgtctacaccatcaaagatacctttgccgataccaaaattttaggctggatgatccagaccgccgataccgagcacagcctgccgcagccggtgctgcccggcgaggagatgaaaatcagcggcgcgcggctgccgaataaaggccagttccgcggtaactggctcaacgagaaagacacgctgcaaaaggcctatgttgaagccaacggtcatttcatcaatcaggatccttaccagtacttcaccatcagcgagagcgccgaacaggagctgattaaagcgaccaacgaactgcacctgatgtatctgcacgccactgataaggtgatgaaggatgacaacctgctggcgctgttcgatattccgaaaattctctggcctcgtctgcgcctctcgtggcaacgccgccgtcatcatatgattaccgggcgcatggatttctgcatggatgagcgcgggctgaaggtgtacgaatacaacgccgactctgcctcttgccatacggaaggcggattgatcctcgaacagtggctgaaacagggctatcgcggtaccggccataatccggcggaaaatctgcttgaggagctggcgggggcgtggaagcacagccgcgcgcggccgttcgtgcacatcatgcaggataaggatcttgaagagaactaccatgcccagtttattcagcgttcgctaaccgaggcgggctttgagagcaaaattctctttggccttgatgagctgcgctgggatgccgccggacagcttatcgatggcgatggccgcctggttaactgcgtgtggaagacctgggcgtgggaaaccgccatcgagcaggtgcgggaagtcagcgccgatgagtatgcggcggtgccgattcgtaccggtcatccgcaaaatgaggtgcgcctgattgacgtcctgctgcgccctgaagtattggtattcgaaccgctgtggacggttatccccggcaacaaggcgattctgccggtgctgtggtcgctgttcccgcatcatcgctatctgctggataccgattttgtggtcaatgacgagctggcgaaaaccggttatgcggtcaaaccgatctccgggcgctgcggtaataacatcgatctgataagcccgcacgatgaggtattggatcagaccagcgggcaatttgtcgatcgcaaaaatatttaccagcagttgtggtgtctgccgaaggttgacggcaagtacatccaggtgtgcacttttacggtgggcggtaactatggcggaacctgcctgcgcggcgatgattcgctggtggtgaagaaagagagcgatattgagccgttagtcgtgctaaaagacgacgagtagcggccgcaaaccgggcagcggctagcatcgcagcccggcacctgcaaagcttcaacgtacaactaacacaacaacaagacagaaaaggaaaagcatatgcacgatcggcgcctcgccgcccgcgcgggtgaacttaagccctccgccgtccgcgaacttctcaaacacagtaaactgcccggcgttatttcgcttggcggtggtattccggctccggaactgtttgataccgaaggtctcaacctcgcggtgcaaaaggtgatgagcgaacgttttaatgatgcgttccagtacggccttaccgaaggttatccgccgctgcgtcaggcggtgagcgaaatctgccagtcgcgcggcgtggcctgctcggcaagccaggtgtacatcacctccggctcgcagcaatcgctggatattgtcgcccgcacgctgctcgatccgggcgatgcggtcgtcgttgaacgcccgacctaccttgccgcgctgcaggtattccagctggcgcaggcgaacatcctgagcgtcgataccgacgataacggcatgctggttgaacaactggccgatctgctggagaccactaaggttaaagcggtctatctggtgccgacgtttggtaaccctggcggtaaaaccctcagcgacgatcgtcgccagcggctggtagccttagcgaagcaacatgattttgtgatcatcgaagacgatccctacggcgaaatcagcttcaccgataaagtgcgtcgtccgctgtatcaacatgcgatcgaacaaggctgtgaagatcgggtggtgtacacctccacgttctccaagatcctcgcgccgggaatgcgtattggctggatcgtgatgccggaatggctggcgcaccaggcggtgatcgtgaagcaggcggcggatctgcataccaatatgctctctcaggttatcaccgctgagtatctgggaatgaatcgcctgaacgatcagatcgccctgatccgcgaagactaccgtaagaagtgcgtggcgctggctgatgcgctggaaagccgtcttggcgagcatcttgagtttagccgcccggaagggggaatgttcctgtgggcccgtttccgctatccgttcgataccatggcgtggctgaaaaagacgctggaaaacggcgtggtttacgtacctggtgaagcgttctacaacgataatccggatacccgcaccctgcgtctttcctattcgaccgtttctgaagccggtctgctgaccgccgtcgaacgtctggcgaaatcgctgtaatcttttgtctccgcaccgatgaccggtgcggagagcttttaatcgggggaggggttactcctactcggcgatgcgatcgtcaagccagataagcatcagggaagagagaaaagcgacagcaatagtgccaataaacaacaacataaaaatttccacaggggttttattatttttctaatgtaaccggtgagtggctatttttgtttgcaatggtgattttagtgtcacgctgagccgttgcaagggtaaaaaaatcatcagcgtcaacatcgaaattcaggacgatttcccggtattttctggcgttaacgagttctttagcttctttcatactactggcgataatagtaggcatcagtttcatctcagtttgaaaactagcaggcaaaataaaagcttgttcgtatcagatcaacatttttttgctactttacacatcaccagaaagtctgtcttcgcgcaatcgtaaccagagtgggagcgtatgcagaagcggaggccagatgaccccgctcaccgtcttaaagctgatactgccaggagaacaggaagcgcttttcggcttcatcgagataggtgttgttatcctgaacgtaggtcataaatttcaccgcgttatgctcggtcaggttatatcccacgccgaccccggcgaaataacctttatagttatcgccatcgtcgttttttgagccatacgatccaccggcgaaacctaacaggcgtagatcggcgctcaaaggtttcagaacaaaggcgccgagataaccgctgctgccggagatattcgtcgattcaaaaccgttctccggcgacggcatgccgttaaaacccgactgcgaacaggcgctatgttgatccttattacaggtcatatggtcgccggtattataggtataaccggccatcgggaatatttggaaacctgctggttcaaagccaaaataactgagcggcaggaacgtaccgatagaatagttggtttgtgaggagtcatcgggataaacatttttcccaaagttaaagttaaaaataccaatgggaaatagccatgaaccgccgacgcgccattccgtggcgtcgctattaatacgcacattgagtttccgcgcttcgtcaaaggccagcgagccggaaaatgcgagattgctgtcgttcagatcgtagttatctgaccacgtcacgccaaatttggtggtcactttagtcgggtcatccgccgatttctcggcgttggttttaacttcccccgtctgggcaaagagcgcgcctggcagcaggccgatacacagcgcgcataccgggagatatttaataagcataaaaaattcacaagttaataataaaatccaactcattactgtacacgacgatattcatcgctaatatcgtcgatatatttaattttgcatttcaccgccggcactagttaattattcgaaacttaataaataacccgcacatagcgggttatttatgaaagagggtacgtaataatatttatagcaggccaatctctttcgcggtgcggtccacggcgcgtttggttttttcaaccagttcatcgagttcgctatgtccagctatcagcgccggcgccatgatcatgcgccccagcgtcgagcggataatcacgccttcctcaaaaccgatggtgcggcagcgccaggccagttcgttctcgttggcaaagcgtttgcgagtggctttatcttcagcaaactgcagggcggccaccagcccggctccctgcacctcgccaataagcggatggttttcgaacacctcgcgcagcgttttttgcagataggggccgctatcggtgcgaactcgggtgacgtggttttcatcgcgtaaggctttcaggttggcaatcgccaccgcggccgccaccgggtggccggaataggtcaggccgtgtgggaaaacgccgcctttttccaccagcacgtcggccatgcgcttgctcagcaccaggccgcccatcggtacgtaaccggaggttagccccttggcaatcgacagcgtatccggttcaaagccaaagtactgatgcgcaaaccattcaccggtacggccaaagccgccaatcacctcatcggcgcacagcagcacgtcatattgccggcagatacgttggatctccggccagtagctttccggcgggaagatcataccgcccgcgccctggaacggctcggcgataaaaccggcgacgttttccgcgcccagttccaggatcttctcttccaactgacgggcgcagcgcaggccgaactcctgcggcgtcaggtcgccgccgtgcataaaccagtagggttcatcgatatgggccacgtccgggatcaccccgcccatttcatgcatgaacttcatgccgccgagcccgcttgccgccagcgtggagccgtgatagccgttccagcggccaatcatcacctttttctccggcttaccgaggatctgccagtaacggcgaacggtgcgaatcagcacttcattcgattccgaaccggagttggtgtagatagcgtggctgtagtgcggcggcagtaggctgaacagtagctcggaaagctcaatcaccgccgggtgggtcgtgtggaagaacatattgtaatagggcagtttggcaaactgcgccgcggcggcgtccgccagatcctggcggctgtagcccaactgggtacaccacaggccggacattccatcgaggtatttattcccgtcgttgtcccacaggtaaagtccttcgccgcgtaccatgacgcgcgccccttcggcgttcagcgctttttgatccaggaaggcatgaatatggtgagccgcatctgaatgttggtaatcggacgtcgaacggttctgattgcttggattagtcatttcgtctctcctgtctgctgaaactgaaaccaggtggttttgaggctggtgaatttatcaaaggcgtgcagcgacagatcgcggccaaagcccgactgtttgttgccgccaaagggaacggtgacgtccagcgcatcgacggtatttaccgagatcgttccggcggtcagctgcgcggcgacgcgatgggcgcggtgcagattgtcggtccacagcgaggcggccagcgcatagatatggttattcgccagatggaccgcctcctgctcgctatcgaaggcgcaaaccgccagcaccgggccaaaaatttcctctttccacagcgccatctcttcgttcacgtcggtcagtagcgtcggctgaacgtagttggcgacgccgtctatttccaccgtacggccgccggtaagcagcgttgctccctcgtcttgcgcgcggcggatagccgccatcactttttcggcatgggcggcgctgaccatagcccccatgcggctttgcggttcgagcggatgcgccggagcccaggcctgcattttttcctgtagtttggcaatgaaggccgcgtaaatcgggcgctcaaccaacaggcgggagtttgccgagcagacttcgccctgattaaaacagataccaaaagctgctttttcagcggccaggtcgagatcctggcagtcggcgaagatgatattggcgctcttgccgccgcactccagccatacctgtttcaggttggactgggccgaataggccataaaggctttgccgacggcggttgagccggtgaaggcgatgacatcgatatcgtgatgcagtcccagcgcgcttccggtttcggttcccagtccggtcaccacgttaagcacgcctggcggaataccggcctccagcgccagttcgcccagacgcagggcgctaaacggcgagttttccgagggcttgaggattacgctattgccggcggccagcgccggacccaacttccaggaggcgaggtcgagcgggaaattccacggcacgatggcggcaaccacgccgatgggctggcgggtaatggtcgccagcgcgccgggcctggcgggagccacttcatcgtagagtttatctacgctttcggcataccagctgaggatgtgcgcggcgccggggacatcaatgttcagcgcatcgttgaccggtttccccatgctgacgctctccagcagcgccagctcttcgcgatgctgaaggatcagcgccgagagacgcagcagcgcgcgtttacgctcctgcggcgccagcccagaccagacgccggaagtaaacgcgcggcgcgcggaggcgacggcaatatcgatatcttctgtctgcagcgaggtgacttccgccagcagcgtattgctggctgggttaatggcgggacaggttttacggcttttcgcgacgtacggttgaccatcgataatggcgtggctgataaagcgctgctcctgcagcttgcgctgccaaaagtttctatcagacatgaaccctctccttcgcatgttgcgtaattgttatttatttgtttctttgagttcatgatgcaggaggccaatgcggcgagaaaggactaaaaatctaggcaacctctataaaaatcgttgttagccaggattggctattttctgtgatccagggcgggaggtcgggcgttgtgatggcgttcaaaaatcggggaggtgcaatttttcaataggctgtaatgcaaagagtttttatttgcggtcagttttctacaaccccggagcctgcgtgcttttggcgatattaaatattctcaaattaaggcattgagaatataaatactacttaaggggaaatgaataacggtgaaacgatcgagttcatcagcctgttttcatgagcggcagcacgattaatacgttgtaatataaggtagttatatgccttgttttttctcatcctgcttatactggccgaagtactatcctccggcgctcgcaattttttcgccagatatctgttaattttctgtaaaaatctgatcgctgtcggattgttgatctttttcacggcagagggttgcaggtcagggtattcatcgtttaaagctaatcagcctgcctccttgatgataaaaaaataaggtatcacatgccccatttcaccctgaaacagctcaaatactttgttgccgtcgtcgaggcggaaagtattgctgaagcctcacgccagctgcatatcgcgcagccgtcaatttccatcgccgtgaagacgctggaagatatgtttgagcagcagttttttattcgccaccacgcccagggggtatcaatgaccccgagcgggcagcgtttttatgaaaaagccaaagaactgctgcggctctcttatcaatttgaacaaaactcgaaggccgacaatgagctggtctccgggattatttccatcggttgtttcgaaaccgccgcgccgctgtatatgccgtcgttgatggccgggtttaagaaaatttatccggaaatcactattaaaatttacgacggcgagcagcacgagattgctcacggtctgcaccgcgggcgttttgacctggcttttctctacgacctcgaactggatacctcgatttataccgagagcctcaacgcgccgcagaagccctatgcgttgttaccggcggatcatccactggcccagcggcactccgtgcggttgtcggagctgagcaatctgccaatgatcctgttggatgtggtgccaagcaaaaactacttcatcagcattttcaaagataagggctacaacccgcaggtggcctacagttcgccgtcgattgagatggtgcgctgcatggtcggccaggggctgggcttctcggtgctggtgacgcgcccggtgaacgacatgacctatgacggccagcaggtacgctgtgtggagattcaggatgaaatggcgaattccgcgctggtgatggcgcacctgcgcagtagtgaaccgactaaacccaccaaactgtttatggagtattgccgcaacgcggtattaagcccgccgcagcaagaagtgaaagtcgcctgaatgagcaaatttacccgcgattagcgcgggtaaatatattcatgtaatattttctgcgttttattgcctataaaaaaacgaagctctgacaatatttttatgagcctcgaagtcatagttatttttcctttcaaaatctcgtgcctgaaaaataaataccgcgtattcgcgtggcggaaatggcctgaaggcaggtagagaccgctgcatcattattttattctcaggtactaaatttataataatttacctgtgtataacggtttattaacctcggtgatgagcagaacatcatccgaaggacacatatatgaccgtagaaaaaatacaaattgagacgctggttgttggcggggggcaggccggtatcgccatgagcgagcacctgagtaaacagggtatttcgcatctggtcgtggaaaagaatcgcattgccgaagcctggcgtaccggccgctgggattcgctggtggcgaacggcccggcgtggcatgaccgttttccgggcatggagtttaaaggcggcgaccccgatgcctttattgccaaggatgatgttgcgcaatactttgtcgattatgtgcgcgagtttaatcttccggtgcgtaccggcgtggaagtcaaaagtgcggtgcgtaaccacggtcgtccggggtttaccattgaaaccaccgacggcgtgattgaagcgctgaatattgtcgcggcgaccgggccgttccagaagccggttattccgccgatcgccccgcgcgacagcgccatccatcaaattcattcggcgaaatattacaacccgcaacaactgccggaaggcgcggtgctggtggtgggcgcgggctcgtccggcgtgcaaatcgccgatgaactgcagcgcgcgggccgtaaggtttatctgtcggtcggcgcccatgaccgcccgccgcgcgcctatcgtaaccgggacttctgctggtggctgggggtattaggcctgtgggatgccccggccagcgaacccggtaaagagcacgttaccatcgcggttagcggcgcgcacggcggccacacggttgatttccgcgagctggcgcatcgcggtatcacgctggttggtctcaccgaatccttcgccgggggaaccgtctcctttaaaaataatctcgtcgaaaatattcgcctcggcgatgaaaactacctggcgctgctggattccgccgatgcttacatcgccgccaatggcctggatttaccggaagagcccgccgcacggcaattcttagcggacccggactgcatgacgtcgccgatcctgtcgctcgatctggcgcaggcggggattaacaccattatctgggctaccggctatgcggtggactacagctggctcaacgttaacgctttcaacgaacaggggcgtcctcagcatcagcgcggcgtctccagcgaaccgggtgtctacttcctcggcctgccgtggttatcgcgccgggggtcaacctttatctggggcgtctggcacgacgcgaagcatatcgccgaccatatcgccacccgccgtaaatatagccagtacaaagacgccagccagcgttaatcatgacttactgaacaggataaccattatgccgacccatactcgtattcggatgttcaataccaaagagacttaccctaatcagacgctggacaatgatttatgtcaggcggtgcgcgccggtaataccgtctacgttcgcggccaggtagggacggattttgccggcaatctggtgggccttggcgaccctagagcgcaggcggaacaggcgatgaaaaacgtcaaacagcttctggaagaggcggggagcgacctgtcgcatatcgtcaaaaccaccacctatattatcgatccgcgctatcgcgaaccggtctatcaggaggtaggtaagtggctaaaaggcgtgttcccgatctccaccgggctggtgatttccgcgctggcgcagccgcagtggttaatggaaattgatgtaatcgccgtcatccctgatgacgcggcgaaataaggaggcagaatgacattttcgattgccgcacgctgcccggaaagcgggcagtttggtatcgcgatcagctcttcaagcattgccgtcggcgcccgctgcccgtggctgcaggcgggggtaggagcggtatcgagtcagaacattaccttaccggcgctggggcaactcactctggcgcagatggagcaggggctgacggcggagaaagcgatgcgtcgggcgctggcggaagacgactttagccgctatcggcagattatcgccatcgacgccagcggccagaccgcgtggttcagcggcgataaaacgctggggacctggcatgttgtgcagggcgataactgtatcgccggcggtaatatgctggcatctgaggctgttattgccgcgatggcggcaacgttttcgcaaaccgaaggcgagctggcgacgcggctggttgccgcgctgcaggccggtgtagcagagggcggcgaggccgggccggtccattcggcggcggtgaaagtggtagatgattactcctggccgctggtggatctgcgtgtcgactggaatgaaacggacccgattggcgagctggcggcgctgtggcaggcctatgaaccgcaaatgcaggcttacgtgacgcgcgcgctcgacccgcgggaggctcccagttacggagtacccggcgatgaatagtcgattacaggatattctggcgcggctgctggcgtttgacaccaccagccgcgaatcgaacctggcgatgatcgacgatattgccgattatctccacggcttcgcaatcgaaacgcagcgtttttatgatgcggaagggcgaaaagctaatctctatgcacgactgggccctgcggggcccggcggcgttatgctctccggccacaccgacgtggtgccggttgacggccagccatggacggttcccccttttgccctcacgcaacgcgatggccgctgctacggccgcggtagcgccgatatgaaaggcttcctcgcctgcgtactggccgccattcctgattttctcgcccaaccgctacgcatgccgctgcacctggctttttcctacgatgaagaggtgggatgtcttggcgtacgcagtctggtcgcccatctgcaggcttcggcagagaaaccggcgatgtgcatcatcggcgagccgacggagatgcgcccggtctatggtcacaaggggaagctggcgatgcgctgcgatgttcacggccacgcttgccactccgcttacgcgcctgatggcgtgaatgcgattgcctgggcggcaaaactgattggccgcctggacgagctgggcgagcagctggcgcttcgccaggatacgcgttttgatccgcctttcagcaccctgcaagtgggggtgattaagggtggcgcggcgttgaatattgtacctcagcactgtcagttcgattttgaaattcgccatttaccggatgtgtcgctcgatgacaccctggcctcgctgcaggcgtatgccgaaggcgaactgctgccaaaaatgcgcgcgacggcggcgggatcggctattacctttcaaccgctcagccagtatcccggcctgttgagcgacccgcagtcggcgttcgccggctggctggcgcagtgggccgaatgcgaggatttttcaacggtcgcttttggcaccgaaggcggattgtttgatgaggccggcgtggccacgcttgtttgtggtccggggagtatggagcaggggcataaggcggatgagtttgttagcgaggcgcagttggaaaagtgcgcgcagatgttgaaaaacctctgccgctggatgtcagcttaaacgccggcgcgccgcgaaggcagcgcgctttcttgtagtccttaaatcttctcttttgcaaaagccatgcttttaacactcttcgctttcgagaaataataatagaccggtgagaccaccaataaacctataatccaggagagatccgcgccgccgaatgtgagggcgattggcccggtataaattgaggtcgacataaacggtacttcgaccagaataccgaggatatagcaggatatcgccgttgcattaaagtagccgtaaataccgccatcgcgtttaaagaaagactcaacgtgatattcgccatgggccactaaataataatcgaccagattaatcgccgtccacggcaccagcacatacagcagcacggtaataaagttagtgtagattaacaggaaattttcctggccatagatggcgaggaatatctccagcagcatggtcaaaatagcggtgataatgcgtgcccgcgccatcggcgaccagccgtcgataaaggtctggccgagcgtcagggtacagagtacgccgcagtacagcatcatcgaattggtggcggcgatccccagcgccagcacgataatcactatcgcccccatgctgccggtcagatccataatcccttgaataatatcgtcattaccgatacaaatcgccaccagtaccccgagcaccatcggcaaataggagccgagaatgcagccaaaatagctggcgtaaaagacgcttttatcgttggtgctgtagggcatatagcgggaataatcagagacatagggcgcataggccagttgccagagcgcggcgatagacacggcgccgagaaaaccgacgatgttgaagccaccgcggtcggcaaaatcgcccggcaggccatggatgaagactatccacacgaaggttgccgccagtacgataccggaaatccacgacatgatccgcgcgtaggagtggatgatcttatagccaaagatggtggcgaacaggcttagcgcgccaaccacgataatcccaatgtccgagttcatcggctgataaatcgcgtgcatcgactgcccgccgagcaccagactggaggcggtaaagccgatatacatcagtacgacaatcgagaccaccagtaccgaaccataggagccaaattgccctttggtctggaccatttgcggtaccccgagttttggcccctgcgccgaatgcagcgccataaagagcccgccgaccaggctgccgataaatagcgcaatcactgaccataaaaaggaaaggtggaaaatcgtcaccgacatcgcgccggtgatgaccgttaacagcataatgttggagccaaaccaaatggtaaaaagatcgcctggtttgccgtggcgcatatttaaggggataggtctgatggtattactttcaagattctcgacattaacagattgatgttttgtcatggtgctctctcattattttggtcttcatcagcgtaagagtgatatttcaatgaggagtacagctaatctactcatcacaacatttcattcaccatttttacaactccgtatcatttgcgaaatgacaaaaaatatcggtgctggatataaaaaaactgctttacctggcgctggaaaaacgccgcatttgtgcgttgcgcgttttttagagctttatgcttcgtgcttaattttttactggcaaacccgctgatggttttttatcgggcagataaaactctgccatattgcgaggggattagaatgatgaaccatagagagaaataacaattccctgtttttattgcggtcttatgagatagatgtttgaccccataaaataatggggaaataaaataattagctgatacatcatgacattagaattgtcgtattgagtaacctaaagtcatacagataatggggataagggcgttatgcgaggcgcttcacaataaccaacagataatcaatataagggcaggaatgcgacatcctgcccgaaaataattaataaccgactttataaacccgtccgctttggatcccttcgacgctgcggcggtaggcctgcgccaccgctgcggccggtacgctggagaaaccggggaaaaagccgtcataggcttcgacggattcactgagcacggtggggcttatcaggttaatgcggatcccgcgcggtaattcacaggcggcggcgcgaacgaagccggccagtccggcgttaacggtggtggcattcaccccttgagcgatgggttcatcggcgacgatgccgctgataagggtgatggaaccgccatcgttaagataatgctggccggtgagggcgaggcgaatctgccccaataatttatcctgcagtccctggtcaaaatcgcggtcggtcatcgtgcttagcgggccaaagtataagctgccggctgctgagacgatggcatcgaccgggccaattttctcgaacagcgcctgcacgctgtgctgcgaggtgatatcaacctgctcgtcgccgtgggtgcggccaacgcggataacctcatgttggcggctcagttcttccgcaaccacgcggccaacggtaccgctggcgccaataacgataattttcatcgcaaactcctcagtgaagtgagcctctattctttaattaatcgattgtcggataaactggctaaaagttagatgattgctaaccagaggtttgtaatatggacaagctgcgtggaatggagacgtttgtcgcggtggtggagtgcggtagcttcaccggcgcggcggcgcgtcttgagatgtcggcggtgatggtcggcaaatatatcgccttacttgaaggccagctcggcacccgcctgttggagcgaaatacccgccggcaaagcctgaccgatgccgggcgagtctattttgacgaggccagacgggtactggagcaggtggcgaatgccgagcgttcagttgaacggctacggctggcccctgccggtacgctacgggtgagcgcgccggtttctttcggcgccagcattatcgcgccgctgaccgcctcctttctgcaggcctggccagaggtacgcgtcgagcttgatttgacgaaccgcatggtggacctggtggatgagggaatcgatctggcgattcgcatcggcgatatccagcgtaccgacctggtggcgaagtatctcgccccttatcgcatggcgatctgcgcggcgccggattatctggcgcgccatggcacgccgcagacgcccgctgatttagccgggcaccagtgtctttcgcatacggtgtggaccgcgcgcaacgagtggcggctgccgggtgctgcggaagaggtacgctggaagcgcgatgcggtgctgcgctgcaacgatggctacgcgctgcgtatggcggcggtggccggcgccgggctgttattgcagccggaagtgctgctggcggaagatttagccaatggccgactggtgcgtattttacaaaattacaccccggaaccgaggccgatacacctgctgtggcgccaggatctgcgcccgttaccgaaacttacccgcttcgtcgaacatttgttaaaggaagtgaacggtatttataagctatgattatcgtgtctgatgaaagcattcatcgtgaaacagtaatggaggtatggatagatgggattattaagttttgtgaaagaagcgggcgagaagatctgggatgccgtctccggctccagcaaggaagatcaggctgacaagctgaaaaaacatattgatagtcttaacctgcctggtgccgaaaaggtcaatattgccgtagcggacgatggtaccgcgacggtaacgggcgacgtcggttcacaggaagataaggaaaaaattctggtcgcggtaggtaacgtaaccgggattggccaggtcaacgatagcgttactgtgacgcagagcggagcggaaagccgttactatacggttaaatccggtgataccctcagcgccatctcgaaagcgatgtatggctccgccaatgactatcagcgtatttttgaagccaataaaccgatgctgaagcatcccgataagatctatccggggcaggtactgattatcccggcgaagtaagccgtgaatcagggatcaatagcaacgttttgatggagactgtaatgggattattagatcaaatcggcggcgtgcttggcgggcaggctggcaaagctgaacaacttcaggcgatcatgacctggattgaacagcagggcggtatccagggaatcctggaaaaattccgcaacggcggtttaggtgaaatcgtcgagtcgtggcttagtcagcagagtaatatgtcggtgaacagcgatcagattacctcggtgttcggctcgcctgccctgcaggatctcggcgccaaactgggcgttgattcgcaaaccgcctcatcgctgattgcggaatacctgccaaaaatcgtcgatggcctgtcgccgcagggcgaagcgccggcccagggcgacctggtctccgcagggcttaatctactgaaaggtaagttatttagttaaacgcttgccgtttgagttttaacttatcacataatacgggcctgaataacggcccgtattttattatccgccataaattcaccgcctcgcgattatttattctgtattactaattgacaacttaccgctgcgttgaaaatatcattatttaatcttaccggaacggttatgataaatttttatgatatttatcggcgtcctgccgggctaattagtttttttatttcctgtagccataaacaaagtaatttaccctttcgcaaaataatgcgcattatctccaaaacataaaaacacctgcacatcacaaccattattaatggtttctgactttggagaatgctatgccgaccaaagaatcatcgccgccgcttattgagaagcacaccattggctatattccgccagaagatcgccacggtaaaacccgcgatctctttaccctgtggtttggcggcaatatcgcaccgctgccgatcgtcacaggcgctctgggggtacagatctttcatctgaatctgctgtgggggatcgttgcgattttagtcggccatctggttggcggggcgctgatggcgctgcactcggcacaggggccgcagatggggatcccgcagatgatccagagccgcgcgcagtttggatcttttggttcgctgctggtggtggcgatcgccggggtgatgtacgtcggtttctttgcctcgaacatcgtgctggccgggcagtcgctgcacggcatcgcccctgccgtcccactgccggtggggatcgtgatcggcgcggtgggatcctgcgtgattggcattatcggctaccgatgtattcacattctcaaccgaatcggcacctgggtgctgggcatcggcattatggtcggctttggctacatcttcacgcatctgcataccgccgatttcttaacccgcggcggcttttccttctcgggctggctggccaccgtgtcgctggcggcgttgtggcagatcgccttcgccccgtatgtttctgattattcgcgctacctgccggcggatgtgcccgtcgccgcgacgttctggaccacctatcttggctcgacgctcggttccagtctgtcgtttattttcggcgcggtagcggtgctggcgacgccggtggggctggaaaccatggatgcggtaaagctggcgaccggcgcgatcggcccgttgatgctggtactcttcctgctgagcgtcatcagccataacgcgcttaatctttatggcgcggtgatgtcggtgataaccctggtgcaaaccttcctgtggcgctggatccccggcagccgcagccgggcgctgctgtcggttatcgtgcttatttgctgtgtggtggcggcgatcttcgcctcggcggactttatcagccactttatcgatctcgttctggctctgctggtggtgctggtgccgtggaccgcgattaacctgatcgatttctacgccattcacaagggcaactacgatattaactcgatatttcaggtggatggcggcatctatggccgttacaacccgcacgcgctgctggcctacgccatcggcatcctggtgcagatcccgtttatgaataccccgctatacgttggcccggtctcggcgtggtttaacggcgccgatctctcctggctggtcggcctgctggtgacctcgccgctgtactattggctggcaagccgcgatagcgcctggcgtcgccgtcaggttggcctcaagcaggcgatggattaagttataaagcggagcgccgctggctggccttacggtactgcagcggcgtctggcgcatcatctttttaaaacaggtaatgaagtaggtcacctcgccaaatcccaccgccaatgcgatggcatcaatgctctcatcgctattacgtagcagatcgcaactgcgttttattcgccgggtgagcaaatattcatggatattgccgccggtctgctgacgaaaaacccgcgaggtatagctgcgtgaaagtcctaggtcgcaagccagctgatcgagagaaaacttgctggcatagtgggcttcgatccagttcataatccgcgaggcgacggtctgctggcgcggcgggtagcgttgcggctgctcgggtagaaacgtcattagttgcatcatcaaaaacgccacctcgcaggcggtggtctgctcgttatcctccagacgctgaaactgttcaaggatcctttcgataaatgccgcgtgctcgctgaggtcgtaaatttgcgccggcaaattgctggcggccagcgccgcgaactgggcctgatggcgcgggaaagcgctgagcgcgctctcgacgaccgactgctcaatgtgcatggtggtgcggtgataaggatttttatcgctatgatcgacctgcactttgtgcaaacggaagggcggaaagataaataatcgccccggacgggcggtgtagtgctggttatccaccaccacgatgccgtagccgctggatatataaagcaattcaacgcattgatgccagtggtagtaaagcacgctggtggtatacatgcgattaaacgaaatggcctgccgatcgagcgtaatacgttccagcagttgcgcttcgcccatttttcctccaggacaacagatttaaatttttacgccatcatttgcaatttatcctccgcgcggccgacaaaatccagcaaaaatgaaatggcggtttaattttgtgagtccgctcactcagcgccgggaataaaagcggttactcttcatccagacgtcgcacacgtggcttgataaaagcctaataacaataacttacctctatcctcgtgttatacgggaggaccctgtgcaacctgaaaacattcatctggataacccactgacaagccgggaagaggtgctacggctggtcaatgaaatgttgaacgcggtggcgccttattttaaaaacgacgccagccgcattgatttagcgaacttcaccgctcactacggccagcaggtcgcgagcatggaaaccttttcccggctactgtggggcgtgacgccgctgttggctggcggcagcgagccgcagcatttctccttctatttacaggcgataaaaaacggcaccaatccgcagcatgccgattactggggcgaagtcgcgccttacgatcaacgcattgtcgagatggcggcttacggattattgctggcgctggcgggcgaaaccgtactggcgcacttcactgctgcggaaaaagagaacttatggcgctggttaaagcagtgcgagacccaggatatcccggataataactggcacttctttccgattctggtgcaggttggctttcattattgcggtatgccgaccaatccgcaggcgcgggaagatcatttcgccgccatggaacgttactacctcggcgatggctggtactcggatggtccgggccgcccgcgcgactattacatttcgatgggcttccatttctatggcctgatttacgcgaagctgatggctgatgtcgatccgcagcgctgtgcggaactgcgtcagcgggccgcgcgtttctcctctgacttcatccatttctttgccgatgacggcgcggcgataccgttcggccgtagtctgacctatcgctttgccgaagcggcgttctggagcgcggcggccttcgccgggctggaagtcttttcgccgggcgtgatgaaaggcatcgtgttgcgccacctgcgctggtggctgaagcagccgatgttcgaccgcgacggcgtactgagcgttggctacagctacccgaacctggcgatggcggaagattacaacgcgccgggttcaccatactgggggctgaaaaccatgctggtgctggcgttaggcgagggcgacgccttctggcaggcggctgagttgccgctgccgccgctgcccgcgcagcacacaatagcccatgcggatcaggtgctggtacatcaggccgatcacctgtggatgctaacttccggccagctggagctgaacaacttcgttaataccgaggcgaaatactgcaaatttgcctactccacccgctttggtttcaccattgagcgggggcgctacgggttgaaccatgccgcccccgattcgatgctgctgctggccgaaaaggataattactggcgcggccgccgcgaatgccagcaggtggtcaccgctgatggcaccatttacagccgctggctgccatggcgtgacgtggtgattgatagctggctactggcgctgggcgactggcagctgcgcgtccatcgcataactacccaccgcgcgctggattgcgcggaaggcggctttagcctggcgaaccgtccgctgccgcaggcgcaggagcgtgacggcgcctgctgcttacgcagcgcccgcgatatctcggcgattttctgtttacatccgcacgcccgccgcggcgagacggtactgacgccgccgaacagcaatctgttgttcgccgaacgcgcggcggtgccagtgctgcgcggcgagcttgatgcggggacgcattgcctggtaagcgcggtatgggcggggaatgccgctgacttcgaaccgcaacactgcccacaggccttcattagcgatgacgcggtacgcttcgtgacggcacgacaagaaacgacgctcgttctggccccggaggcatcgctatgagcacatcatcgtccgtacgcgccgcgcagtacaaaatgagtacctttatttttctctactttttcacctggtcatccagctttggcctgtacgcgctgtggctgagccagaaggtaggtctcgatagcattaccatcggcagcgtgttcgccattaatggcgttttcgcggtggtcctgaaaccggtgtacggctacatcatggacaaaatcggcatgagcaagtggctgctctattttgtctgcgccatttccgcgctgatggcgccgttcttcgcgctggtgtaccagccgctgctgcaaagccacgcgacgctggggattatcatcggcgcgctgtatttgagccttggctggtacgccggggtggcggcttccgaatcttatgccgaccgctttagccgtctgtacgggctggagtttggccgtatcagaatgtggggttcgctgggctgggcgatggcggcttcggtctccggactgctgtttaacttcacgccgctggctaactttttgctcagcagcggcacctcggtactgatgctgctggtgctgattagcctcaaaattggtgatgaacagctgcgcaataacaacgtcatttccgcgaataagatcgtctttgccgatgtgttgatgctgctgaaaaatcgcaaattctggatgttcagcctctacgtcgccggagtcgcgtggatgatgttcatcgccgagcagcagttcccgcgctatttcgtctcgttctttgccaccaaagagcagggcaacgcctggtacggctatctgagtaccgtccagtcggggatggagtttgtgatgatgatgtttatcccgtggctggtgaaccattatggcgccaagcgcggcctgctgttctgcggctgcgtggtgggggcgcggctgattgcctccggcttgaccaacgacccgattgtcatctccattatcaaacctttttacggcgttgagatcgcgctgctgctgatttcagttttcaaatacatcgccgaacacttccatcgtcgggttaacgccacgatgtacctgctgggttaccaggcaatgatttacgtcggatcgattgtggtcgcgccgccggcgggttacctgtacgacaaaatcggctttgagcatacctatctgctgatgggctgctgcgccctgacgtttacgctgatttccgcttttacgctatcgcgctgccagtcgaagcgcgatgcctcacgaccctttactccggctttagataccgcctcggttgaaccggccaaacattaattcaggagttgttatgaccaaatctgttatcaccgaagcgctgcggccgatagaactgtatcaggtcgaccgcctggcgttgagccagaagctggaagacgcgctggcccgcgtgacgcgcaagctggacaaaaatatcgttgccttcggcgataagttccccggcgaagcttgtgaaaacggcatctggccgcgtaccgataacgtagagtggaccaccagtttttggccgggccagctgtggctggcgtgggagatgaccggcaaagcgcactaccgcgaagccgccgagcgctatttaccgtctttcgcccggcgtattgagcagcgtatcgacaccgcgactcacgacctcggcttcctttattcgctctcctgcatcagcgcctggcggctcaccggcaatgaagccgctcgccagtcggcgctgctggctgccgagcgcctgatggagcgttttaacccgacggccaaaattatccaggcgtggggcgacttaaacgatccggagcagcaggggcgaatgatcatcgactgcaatatgaacctgccgctgctgtactgggccagcgagcagaccggcgacccgcgctacgcgcaggcggcaacggcccacgccgggcaggcggcgaattatatcgtgcgtgaagacgcttcgacttatcacacctactatatggatgtgcagaccggcgagccgcgctttggtaacactcatcagggctacagcgatacctcatgctggtcgcgcggccaggcgtggggcatttacggtttcctgctgagctatcagcacaccggcgataagcagatggttgagctgtcgcgcagcctggcgcattacttcctcaaccgcctgccggaagatgatgtctgccattgggatctggcgttgctcggcaccgatgccgtgcgcgacagttcggcggcggcgattgccgcctgcggcctgctggagctggtcaaggcgttgccaacgctcgacgccaaccgcgcgtattacgaagagatggcgctgcgcattgcgctgtcgctgaccgacaactacctggcccacgacgatgaccctaccgaagggttgctgcagcactcggtatatcacatgggcagcggcaagggcgtcgatcaatgctgtagctggggtgactatttctatcttgagctgctggcgcggctgcgacagatttggtacccgtactggtaaccctcaaggaatggagagcgagatgaaaagcgtagccgtgttattagcccccggatttgaagagggggaagcgatagtcactatcgatatcctgcgccgactgaatattgcggtgcagacaattgcctgcggcgagagtcgcgaagtggtgagctaccacgctatcccgatgatagcggatagcaccctgaaggccagcttcgatcaaacctttgatgccgtggtgttgccgggaggcccggaaggcagtgttaatctggcgaaaagcgcggaggtcattgccttcgttcgccgccacgatgaagcgggtaaatatatctgcccgatttgctccgccgccgcccgcgtgctgggcggcaatgggctgctgaaggggcgtcgctatgtctgttccggcgatctttggcagcaggtgagcgatggcgtgtacgtggacgccgacgttgtggaagacggcaatctgctcagcggccgggggttgggcaaggtatttgattttgctttcaccctggcggcgcggttacagggtgatgaagcgccggcgcgcgaacaggcggaacatatttattatccgtggtagaggaaaatagccagtgactgctaaaggcgccttagtggcgccttttacttttgtagcgccctctcatgtcgcctggttattagcgcgtcaaggattgccttaatctcacttaaatgatattaattatcattctcataataaaaacataataacaatattaatacctggcaaggatgtgagcttaacgaacaaccactttaagttaggcatgaattagggaataggtatgagaattaacaagatcctctggccgctcaccgcgctagtggtagggttgaatagcccgctatccgccgccaaatcttccgatgatagcgatgaaacgctggtcgttgaagccaccgcagaacaagtacttaagcagcagccgggcgtttcaattattaccagcgaagatattaaaaaggaccctccggtcaacgacctctccgatattattcgcaaaatgccgggggtgaacctcaccggcaacagcgcgtcaggcacccgcggtaataaccgccaaatcgatattcgcggtatggggccggaaaacaccttaatcctcattgatggcgtcccggtgacctcgcgtaactccgtacgctatagctggcgcggcgagcgtgatacccgcggcgatactaactgggtaccgccggaacaggttgaacgtatcgaagtcattcgcggcccggcggcggcgcgctatggctccggcgcggcgggcggggtggtgaatatcattactaaacgcccaaccaatgactggcatggctcgctctcgttatacaccaaccaaccggaaagcagagatgaaggggccacccgacgcgccaactttagcctgagcgggccgctggccggcgatgcgttgacgatgcgtttgtacggcaacctgaataaaaccgatgccgacagctgggatattaactcttccgcggggacgaaaaacgccgccggccacgaaggggtacgcaacaaagatattaacggcgtcgtctcctggaaagtgaatccgcagcaaattctcgattttgaagccggatatagccgtcagggtaatatctacgccggcgatacgcaaaatagctcttccagcgcggtgaccgaaagcctggcgaaatctggcgcagagactaaccgcctgtatcggcagaattacggtattacccataatggggtctgggattgggggcaaagccgctttggagtctattacgaaaaaaccaataacacccgtatggatgaaggtttatccggcggcggcgaagggcgtatttcggcggatgagaaattcaccactaaccgcctgacctcctggcgcaccagcggcgaactcaatattccgctggatctatgggtcgatcagactctgaccgttggcgcggagtggaaccgcgatgagcttgacgatccctcttccactggtttatcggtaaatgataataacattggcggtattcccggttcagcggcggatcgcagcagtaaaaatcattcacaaattagcgccatctattttgaagataatattgaaccgacgcccggaaccaatattattcccggcctgcgttttgattatcttaatgagtccggcggcaactttagccccagcctgaacctgtcgcaggaattaggtgattacttcaaaattaaagccgggattgccagaacctttaaagcgccaaacctctatcaatccagcgaaggctatctgctctattcgaaaggcaacggttgccctaaagatattacttcaggcggctgctacctgattggtaataaagatctcgatccggaaatcagcgtgaataaagagatcggcctggagtttgccctcgacgattatcatgccagcgtgacttatttccgtaacgattatcagaataagattgtggccggcgatgatattatcgggcaaaccgcttccggcgcttatatcctccagtggcagaacggcggtaaagcgttagtggacggcattgaagccagtatggcgttcccgctggtgaaggatcgtctgaaatggaataccaacgccacttacatgattacctcggaacaaaaagataccggcaacccgctctcggttattccgaaatacaccatcaacaactccctggactggacgattacccaggcattttccgccagcgtcaactggacgctgtatggtagacaaaaaccgcgtacccatgcggagtcgcgcagcgaagataccggcggcctgtcgggtaaagagctgggggcttattcgctggtgggaaccaactttaattacgatattaataaaaatctgcgtctgaacgtgggggtcagcaatatcttcgataaacagatctatcgttcatccgaaggggcgaatacctataacgaacccggtcgggcctattatgccggagtgacggcgacattctgatcgcatcgtcatcagtatactgcccgcaaccgcgcgggcagtatcaacgctgggttaaggacaactatgctggttggacgctttttcgcgactcatatccagcagagcgctgtggaatgaggcgttaaacatcggcccgtgccccaggccagggaaatcccaaaaggcggcattaacccctttctctttcagcgtggcgagggtggcatgtactttagttagcacttcagcggcgtgcgttgcccggttatcacccggcgtcgccgaaccctccataatagccaggcttttggcgcaatatgatgcaggctcgaccgccgtgattcggttcagcagggcaaagttgtcccggccaagcgaaggactggcgctgtaatatgaatggaagaacgaggacgaaagccaggagtcgagcgcgaacaggccgccgtatgagtggccccacaggccgcggcgctgtgggttgattttcagcccttgctccgccttagcggctatacgcgtttccagtaattgacggaagtcttcactgccgccgcttttgcggccagcatatgtttcattattctttctgactgccggcgtatagtcgtaggcccggccgttaagatcgaatggcaggttggtctgataaccgatcgcgacgatcaccggcggcgattgcgccgtcagctgcttgagtagttcgtcagacaggcgatccattaccgcattaccatcaagcatatatagcacgggatagcccgttggtggcgcggctttattcggtatggccgtccatacccgatagtggcgagcgccgtcggcggaatcgaactgattgacgctgaagtggtaaaacgctgaacccttatcggcgatattgggccccaacggctgcatatccggttttgctaagcctgaagcgctatagctgagggtgaggcaagaaagaacggcaaaaagcgccttgcgcgggcgcgtagagcgagactcgcgggcatacatctgatgattattccttttccgcaggtgaaattttcgttattcagaaagcacatacagttgcctgaaagcgcttgctggtcaagtcaaccctgcagtaagccgagcccatcaagcaaggcgccgcgccaccaggcgtagtcgtgcccgccggtgtaaatggcgcaatgactatcaacgccggacgcctgtagctgctgatgaagctgctggacgtgaggcaccgtcgaaccttccagtgagcccacacacaggcggatacggacagtacgcggcggcgcagacaacacatgttcgctgacccatgaagtatcggttgcgctaaataaatgggggcgactgccgccatctggcgtccaccacatagaaggcgaatggctgagcaccagaccgaaagtttccggcgcatggcgggcggccatcagcgcgctgacgccgccgaggctctgcccggccaggacggtgcgtgagcgatccgcccatttttgtcgcggctgttcgcggcgaatggtcggcaggagatgttccgcgacgtcccgtatcagttcgctgcgcccgccgagtatcgtggtgcgctcgcgctcatcgatattgtcgatgcccagcagcgccacgggaacaatgcggcggctatcgatcgcggcgtcgatggctgcgcacaccccaagatgatcgaaccaggtttcgccatcgggtagcaccaccagccccaacggctgcgacttatcaaccgcgggcaggtacagacgcacctgccgtgattgcccggcaacgatccgttctgaggtcagcaaggtgccggcgtggcggcctccgcgccattcggattgagcgggggcgttatcaagcgccagcaccgactcccgcacgccgtcgcgaatagcgatccccggcgtcttattgagcggatcggcctgtccggcgagagcggcaaagcggctcccaagctgattaacaacctcttccggcgtgcctggcgggatctccaccagtgaataagagccgcaatagttggccggcaggcgcagcgtcagggtccagatatccgttgcgggaatctgggtcatcagcccttttgccacctgttctttgtcggttacccggtttaatcgcagataaacgcctctgagcggatggcgggcgcgccacaaaaaagtgacttcacgttcatcggctgcgccgtccaccgttgttactagcggtaccggcagcgatgcggcctgctgccagaaatgagaaagatcggtaatgttgccggtcgccaactggcggcgcaggccggcgatagccgctgaaaccggcggatgtggattgatattgaacattctatctctttgaaaaatcatgctaccagtaaaaatagctaaagcggctgttcagcgaacagccgctttaggcgtgttgattaaggtctaacgcttaccatcactatcccacgatttctcccgttatgtcgtgttggttgcgtgcatctgccgggccgacgctatcgcgccataagcgggcgtagaggccgttcgccgcaagtaattgctcgtgtgtaccgtattctgcgagccgccctttatcgacaacggcgatcagatcgcagcgctgggcagtggtcaggcggtgcgccacgattagcgccaggcgttttctggcacgggcgacttcggttaacgaagacatgaggcgctcttccgcgcggcgatccaggcgcgatgtggcttcatcgagcagcaggacgtgggcattcgccaactgggcgcgagccagcgcaatcaactgacgttgtccggcggataaatccgcgccgccgttattgactggcgtgcggaaaccttgcgggagctgacgtaccagctcaaacaggcctgcctgccgtgaagcgatctcaacttcggcattgctgctggatggccgcgaataacgtatattctccgcaatatcgccgctaaagagcgcaacatcttgatcgaccagcccgatctgacggcggtaatcggcaagggttgtcgccgtcatctgtcgttccccaatgccgatggtcccgctggtgggcgaatagagtccggcgataagtttaatcaatgtcgacttcccggcgccgctgcggccaacgaccgccacgacattgcccgcggggatggtcagggtgagcttgtccagcgctggctcagcgctgccgggataacggtacgtaacttcatcaagctgtaatgcccccgtggccggctgggtggaggaaggggggacgttttccgtctcttcggtcgccaacagttcatcaatatgtttaccgctggccgtcgcctgctggaaggaatccacaatcccggataattgctgtaccgggccgtaaaactgccccagcaacaggaagaatgccgccagcaccccggcggtcatttcgccttcggccaccctcgatgcgccaaccagaagcacggcggcataggaggcctcggtacagaaggtcaggaaggggaagtagaccgcaagatatttctgcgcgcgtacgcgggtggcgcggaagcgatccgataatgcgcgcagccgggcggcctcttgctcctgttgaccatgggattgcacgacgcgcaggccggagactttctcctgcagagtgctattcaccttgccgatttcaaggcgcgcctgggcataggctggagagctcaggcgacgataaacccaggtcgccagcgcgactaccggcactgcgcttaaggccgtcaacgccagaatggggtcgagccagaacatggccgcggcgatggcgaacatcgtgaccaggctggtggccgcgccggcaaggccgttttgcagaaagcgggcgagggagtcgacatcgacggtcatccgggtcaggcgtgaatcaacgtgcttttcatgccaggggagggcaagacgcagcatatggccgaagctgcgcaagcgtaccgtatgttgaaccgactccgccgctctggcggcgaagatggtttgtagtgaataacaacaccagcttatgaccaccaggcacagggcgagcagggcgcagacgccgatagtcgccatatcgcctgcggcaacccccgagtcaataccgcgctgcagcagtattaacacgccgacgccagcggcagaatccagcgcgatcagcagggcggcgatgatgaacatccacgccaccggccgcagcagcgaggtcaatctacgtccctctccggccagcgcctgttgaaccgcctgttccggcacgcgggtcatgcgggcgacaaaaccgttgccgtcaacttccggcaacgcttgcggctcctcgttctgcatcgctggcgttgttggccaaagatcgcggcagccgccggcgccaggttcgaggaaatccccgtcgccggtcatcagcgcgcggaacgccgggcagcgagactcaagctcagcctggctgccgatgtccaccacttgccctttatccaacaccacaattcgactggccaaccgcagcgttgcccggcggcgggcaatcaccagcagcatgtgctggtcatcggcgtaacgacccagcgcggcattgatctccgcttcggtaccggcatctaccgccgatgtggtgtcatcgagaatcaacagttccggtgcggtaatcagcgcccgcgccagcgcgatgcgttgccgctgtccaccggagaggttagtaccgcgctcggttaggcgggtatcgaagcctttcggtaaggcattgataaactcgctggcgcctgccgccgccgccgcgcggcgaatatcttccatcgtcgcctgcgggtggccgtaggcgatattttccgcgaccgttccggcaaacagaaaggcgtcttcaaataccacccccacctgacggcgtaacgcctcaagcttgagatcgcgaaggttctgccgaccggtgctggtgtctagccaaatatcgccagcgctgggatcgtaaaagcgcgccagcagcattagcagcgtcgatttaccggagcccgacgcgccgactaccgccagcgtttcacccgcctgtagggagaaggaaacatcgctcaggatacggctgccgccgccataaccgaagttcactttttctaactgcaggccaataacacgaccattgagcgcttcgctaccgtcaaccatttgcgaacgggtgtcgatcagagcgaatacccgttctacggatgcctgggtacgttgggcgatcaccaggaacgacgccagcacacgggtaggtccggtcaacatggcgaggaaactggcaaaggccacgaaggtcccgaggtcaattcgcccgtgcatcactgaccagccgccgtagcacagtagaacgatttgcccgagtaccggtagcgccagcatggtagcgccaggcatcgcctgcgaaatggccgcgccgatgcgcacgcgcaccatctgtcgcgactgacgatccagccagcgcgtttcgcgcagttccgccacgcaggatttcaccaccgagatctgcgccagaacttcgcgcatgtgctcggtcagattcgccagccggtctgaagccagccccgtctgagcgaatacccgacgacgggcgcgcagcgcggtaatggcaagacacgccagcacgcagaccacgattagcgtcatggccggcgacatccacagcatcacggcaataccggcgatgtagtaggtaaataccgccagcggtaccggagccatctgcaatagggtatgcatttgctgcagatcgctattggtccgtgaaatcacctgtccggtacgcagcgcatcctggcctgcgccatcgagcttttgaatactgtcgaacgctcgtcctcgcagggtgtgctgcacccacagcgatagctcgccagcatagccgcgtcgtacatagttaccgatgaaatcaaaaaaggcgatcagtagcagtccgcaggccagccacggcaggcgggtaggatttcccgccagcgcatcatttaccgcctgccgcgtcagtagcggcgtcagcgcggccagcagaatggtcgacaccgacgccaccaccacgatggcgctaagtttcttacgttcccagcacacgcgcgcaaggcggattatccaggaccgcgcgggtgtgggagagtgagtcgcaggcattaagcctcctccgtcaatttaaagatgaaatccgccacggcggccattaccctttttgcgccatggcggccagttctttcgccacctcggttgggcaggcctgcgccgccatttccgccgccacctcttcagaggccgtacgtaatgcgcaatcgtcgaggaaagcattgatcatgctgctcgacagacctccgtcgccggggatgatcccgcagccgcgatcgactaccgcgcgggcgtttactgggcgatcggccccctggccgaaaacgatctgtggaatacccgcgtgcagcgccgtcagggtgttgccagcgccgccgtgatggataaaaccatcggcgccgttgaggaaggcgcccatcgggatccagtcaaccaggcgaacgtttgacggcaacgcgcgtagatcggagcgcgcattggctgagagatgcagaatgatctcggcatcgacttcactggcggaatccatcacccaggagatcagatcgaggccatcgaccatcggtttgacggtgcccaggctgaccagtagccgtttgcgatcgggcgtgcgttcccaccattcttcccaaaccgcaccgccgttatacggcacgtattgcatgggaatgatcggttcgccatcgttttgcaggatgctcatactcggcggcgtcacgtcgatccacgccatatcctgcggcggagcttcgacgccgtggcggcggtaggcgtcagtgagcgagcgcgtcacacctttgatatgccagggggtgtggccgaagccgacagtttgcatgaccaccgggatatcgtatttggcggcgatcagcggcccgacgacgccgaggggaggatagacgataaggtcgggccgccagtgtccggcaaactccaccagttggtcggccatctcttcgctgaagaacgagaagttgcccattttggtgccgatgttactttccttccgctgcgcctcgcggcggcgataatcggcctccgaatcgaagccgggcgcggcatcaaacaccaccagccctgcctcggccgccttttgggcgaatttaccgctactggcgatcagcacttcgtgaccgttaacgcgaaatgcctgcgccaaagacagcaccgggtatagcagcccatagagtggtgggccaacaaacagaatgcgcatgagaaaatccctctccgcttgacgaactaattcaggaagtcgacgcagtcaatatgccggccagcgcgacgttaactatcgttaacccggctgtgcctggcgctgcgccattttttagtttcgccagcgcgacgcacggcaacgccggcgaccctatcgcaggcggtgaatccgtagcgcacgctgacgaatcgggaattccctgtcccgacttccattaacgcttgcgcgtcattgtcctgatgaacggcctgacgcgccgccgcactgccacggcggcttgtgaggccgcatttgccgggtgagaggccggtcaacgcgctgggcgatgtccgtaattcctgaagacaccgtgtcgcatcatcctgatagcgtcgccttcgcgggtcggtaagggacaaagcgccgttgttcaggcgatgctcgttcccttacggcctcggtataccttgccaaagaaatcaccaatgcaaatgctaatgagaataattaccaatatcatttgcaaattgcaatgataagtaaaaacttaatggaacgggtaaacgtttataggacaaatcgcaggtgagcttttcaggaggggcgatgggttccggtaagtgatgttgttctgcaggaacaaaggccaatcggttatttttttattgcggaaagcggctgcttaccgctcttcattacccgcgtatgatttgtgatatgatgaaaaagcgaaactttttctcttttttccaggttaaacgatacttatgagcgcgttcgatcactcgtcagatgacacccaggaaactatcggcaacagcctgcgccgacgcccactggcgcgcaaaaagttgtctgaaatggtggaagaagagttggagcagatgattcgtcgcggcgagtttggcgaaggtggacagcttccttcggaacgtgagctgatggcgttttttaacgtcgggcgcccgtcggtacgtgaagcgctggctgcgctcaagcgtaagggcctggtgcaaatcaacaatggcgaacgtgcgcgagtctcgagaccgtcggcggacaccatcatttccgagctttccgggctggcgaaggattttctctccgcgcctggcggtatcgcgcatttcgagcagttacgcctttttttcgaatcaagcctggtgcgctatgcggctgagaacgccacggatgagcagatttccctgttaagcaaggcgctggagattaacggccagtcgctggatgataacgcgcaatttattcgctcagacgtcgatttccaccgcgtgctggcggagatccccggcaaccctatctttatggcgacgcatgttgctttgcttgactggctaatcgccgcgcggccgaaagtgtcggagcaagagcttcatcatcacaataacgtcagttttcaagagcatattgccatatttaacgccatacgcgatcgcgatccggacgaagccgatcgtgcgttgcaaacccacctcaaaagtgtttccgccacctggcgtgccttaggtaaatccaaaaaatccgctaaatgatccctgcctcgcgatcggtttagtgaactcgatcgcacaataagctttccctattgtactgctttaaaaatgatctggtataacaggtataaaggtacatagttaatccagtcaaacatcattacgaggtatatatggttagccatttacgtggcgtgatgcccgcgcttctgaccccattcgacgcacagcagaacatcgatcgggcgagcctgcgtcggttagtgcgtttcaatattgagcagggcgttgatggggtttacgtcggcggatcgaccggggaggccttcgttcagagcctgtccgagcgcgaagaagtccttgaaatcgtagcggaagaggcgaaagggaaaattaccttaattgcgcatgttggttgcgtcagtacggcggaaagccagcagctggcggcggcggctaagcgctatggttttgatgcggtttccgcggtaacgccgttctactacccgttcagctttgaagagcactgcgatcattatcgcgcaatcattgattctgctgatgggataccgatggtggtctacaacattccggcgctgagtggggtaaaactgaccttagagcagattaaccaactggtgacattaccgggggtgggcgcgttaaaacaaacgtctggcgctctctatcaaatggagcaaatccgtcgcgcgcatccggaactggtgctctataacggctatgacgaaattttcgcttccggcttgctggcgggcgctgacggcgggatcggtagtacctataacattatggcctggcgctatctggggatcgtgcaggcgctgaaagagggcgacaccgcgaaggcgcagcagctgcagcatgagtgtaataaggtcatcgatctgttagtcaaagtgggcgtattccgtggactgaaaacggtgctgcactatatggatgtgctctccgtgccactctgccgtaaaccgtttgcgccggtagaggataaattccaggccgaattgaaagcgctggcgcagcagttaatgcaggagcgcggctgatttctcgccggagacgctcataaactgcgctttcgatgagagattcaatcagacatctgaagcgggcgtcatccggcaacaacgatattcaattcataccaaagcgagtgggcgcagcccatcgcgggagactcaccatgagtacaacaacccagaatatcccgtggtatcgtcatcttaaccgggcgcagtggcgggcattttccgccgcctggttagggtatttgcttgatggttttgattttgtcttaatcgccctggtgctcactgaggttcagggggaattcggtttaacgacggtgcaggcggcaagcctgatttccgccgcttttatctctcgctggtttggcggcttgatgctcggggcaatgggggatcgctacggtcgccgcctggcgatggtgaccagcattgttcttttttcgttgggtacgctggcctgtggttttgcacctggttacacctctctctttattgcccggctggttattgggatgggcatggcgggagaatatggctccagcgccacctatgttattgaaagttggccgaaacatttgcggaacaaggcgagtggatttctgatctctggcttctcggttggcgccgtcgtcgccgcgcaggtttatagtctggtggtgcccgtttggggctggcgtgcgctctttttcatcggtattgtccccatcgtttttgccctctggctgcgtaaaaacattccggaagcggaagactggaaagagaagcacgaaggtaaagcgccggtacgtacgatggtcgatattctctatcgcggccagcatcgggtgctaaacatcatcatgacctttgtggcaggcgcgtcgttatggtactgctttgccggcgaggcgcgtattgccgggttggttgcgctgctgggcctggtatgcgccattatcttcatcagtttcatggtgcaaagtagcggtaaacgctggccgaccggcgtgatgctgatggtggtggtgctcttcgctttcctctactcctggccgattcaggcgctgctgcctacttatctgaaaactgaactggcctatgatccacatactgttgctaacgtattgttctttagcggttttggtgcagccgtcggctgctgcgtcggcggtttcctcggcgactggctggggacccgtaaagcttacgtttgcagtttactggcttcgcaactgctgatcgttccggtatttgcgataggcggcaccaatgtctgggtgctcggtttgttactgttcttccagcaaatgctgggtcaaggaatttcagggatcttaccgaagctgatcggcggttatttcgaaaccgatcagcgtgctgcgggtctgggatttacttacaacgtcggtgctttgggcggcgcgttagcgccgattctcggggcgttaattgctcaacgcctggatttaggcaccgcgctgggttcgctctcctttagcctgacgttcgtggtgatcttactcatcgggcttgatatgccaactcgcgtccagcggtggatccgcccggaagccatgcgtacccatgatgcgatcgatggcaaaccgttcagcggcgcagtgccgtttagtcgcggtaaaagcacattagcgaaaagtaaaaattaaccatggcgcccggccaatcacgaatgtttgcctaaggatatgatgatgtctttacttgaacagcttaatcaaaacattgcgcaatctggtggtttgatagtttcctgccagcctgtaccaaatagcccgctggataagcctgaaattgtcgctgcgatggccctggcggcggagcaggcaggggcggtcgcgctgcgtattgagggcattgataatttacgcgccacccgcgccgtcgtttctattcctatcatcgggattatgaaacgcgatctcgacgattcgccagtccggatcaccccgttccttgaagatgttgatgcgctcgcgcaaggcggggcggatattatcgccgtggatggtaccgatcgcctgcgcccggttaccgttgcggcactgctggcgcgaattcatcagcatgctttactggcgatggccgactgttcaacttttgaagatgggatggcttgccagcagcagggggccgacattatcgggacgacgctttctggctacacgacggtgaaaacgccggaagaacccgatttcgctctggtgaaaacactcagcgaggccggatgccgggtgattgcggaggggcgctacaataccccggcgcaggcggcaactgcgatgcgccagggggcatgggccgtgaccgttggctctgccatcactcgtcttgagcatatctgccagtggtataactcggcgttaaaaaaggcggtgtcatgactacgcttgctattgatatcggcggaaccaaactcgccgccgcgctggtggatgatgacctgaacctccttaaacgccgtgagttgccgacacccgccagcaaaatgccggaagcgctatgttcggcgctgcaagatctgatcgtgccgttgtttgctcgcgcccagcgagtggcaattgcctctaccggaataattagcggcggcgtgctgtcggccatcaatccccataatctgggcggtttgcagcattttccgctgacgcagaccctggaaaaaatcaccggcctacccacactggcggttaacgatgcgcaagctgcggcatgggcggaataccatgttctgggggatgaatgtcgcgacatggttttcatcacggtatccacaggtgtagggggcggcgtagtgagtaatggtcggctaatcaccgggaatggcggtctcgccggccatctgggccatacgttagcggacccgaatggaccgctatgcggttgtggtcggcgcggctgcgtagaggctgttgcttccggacgtggaatggcggccgccgctcagggagaactcagcggatgtgatgcgaaaacgattttcatccgtgccgggcaggatgatgagcaggctattgggcttattcaccgttcggcacagaccttagcgagattgatcgctgatgtaaaagcgacaacggattgccagcgcgtggtggtcggtggcagcatcggcctggcggaaggttatctggagatggtgagagcttaccttgcgcaggaaccgtcggtatatcacgtaatgttacaacccgcgcattaccgacatgacgcgggattgctgggagcggtgttactggctcgggagaataactcatgatagcaggtgatattggaacgctaaccgcctccgggatacatcccgttttagccgaagcgttgatgctggcggtagccgtttgtccacaggagaaatctcctggacgtttcaatctacgcggtgacgatatttttatgaacgtcatggtatttactacccagccagcggaaagtaaaaaatcggaacagcatgcgcaatatatcgatattcaactgttgctaagcggtgaagaacgtattctgtggggaatggtaaattgtgcacagcagtgcgaagcgatacacgttgaagaggattatcagttgtgtaatgcgattgaaaatcagcaggccattacgctacggcctggtaatttcgtgatatttatgcctggtgagccgcataaacctggatgtattacgacattgccgcaggagattaaaaaggtagtcattaaggttaatgttagccttttgcaaaacgaatactgatgctgagattattcctggttttgtttgtgtaatgtgttcttcatttaaatctgcaaaatttaaactagcttattagggggctccttttcttaaaacatgcaatatagggactgttatggctattgatatgtatctgaaggttgatggggtaaccggtgaatctaacgactcaaatcataaaaattggatagatgttttgtcatttagctgggcggctgagcagcctgggaatatgagcgttggcggcggtggcggagcgggtaaagttaattttcaggacctttcggtacaagcattgatagataaagcaacgccggcagttctcaagttttgcgctagcggtaaacatgtcgctaaagtcgaactatcaatttgcaaagccggcggctcgcaaattgagtattcgcgtgttgttcttgaagatgttctggtgacgaaaaccagttttagcggtgtgggtcataccgacactattatggtgaattacctgtttcaggcatctaaagttaatctgcattattgggagcagtcttctcaagggaccaaaggcgcagaaactaaatcgggttgggatatcaaacagaataaagaaatttaatcgacgctggagcgcctgcaatgccagatattacctccgagataaatgcggttctctccgatcattcccggtttgacgcagagcagctggatattattatttcattcgtcaatgaactggataaaggaactttgagtcagtttgagaacgctccggatcgcacgattatggatacctatgagcgcttgctttctgccagtaaagagcctgccagaagacaacgcgacgaagaatacgaactggaatctctgacgggggccagtcgtcgtactaccaccatgagcaatcatgccgcgttttttgatcgcttcagaacaacgcccgcgcatatgtatggttacggcggcaacgtctaccgggatcagacaaaaagctattacgatgtggccggtaaaatactggcaggcattggcggtctcgcttcttttggcgcaggtaccgccgccatcgccgcctcgcaggcgggttcgtcgctttcgggtatagcggcgcgttatgcgttatcttctgtcggcgcgaccggcctggccgctggcgcgatggcgttgctccgtaataatttttccgatgttcaggtggcgacgaataaagatttcctcgaaaccatcaagtctatcgccaagctaagaaacaaactgaatgatttcttccagggcctcaacaacaaggtctattcggataagacaaaagcagaaacggcgctcaacaatgaaatgaagtcacatccgttacgttttggcgtcggttcaggaagtcaggtagtacatgcaaacctggccccgattcaacgtttggtcactcaggactttgttaccgtaaaccacgagatcagagccaaaattttgccgaagggtacaaattcagcctggagtgttgctgtttcgagctcagaaatgggttgggatgaacgggtattggaccaggctaacatgggtattctgcagcaggtcgttcatcagctttaacgcggttgtgttggcggcgaataatcgaacgcagttcgatgaagagtccggccgtagaaaagcaaaaacccgccttttgggcgggttctttaaatagtggtgcccggactcggactaacgccgcaggcgttgaacagcgcgcttgtcgcgctggccccgaaggggtgagccgcgttgcggcgaataatcgaacgcagttcgatggagagtccggcccgcagaaaagcaaaaacccagccataggctgggttctctgaatagtggtgcccggactcggaatcgaaccaaggacacggggattttcaatcccctgctctaccgactgagctatccgggcaacggggcgcattaaacctgattcaccgcgcctcgtcaacgaaatttataaatttcgcagcagactgcacaatctatcaccactttgccgtaaaagcacgcgtcgtcaggcaaaaaaggccgtccacgcgaccgaaatcggcattgccagcagcagggcggggagcatattgaccactgcgaacatcttaatcccgcagatacgcaggccggtcgccaccagcagcataccgccgacggcgctgaagtcggccatcatcattggcgtggtcagcggcatgataagcgaggcgcaggccgctagactcagctgaatcagcagcatcggcacacagattgccgacaccgccagccccagcgtgcaggcgaaaatagtagcggtgaaaaagtcgagaaacgctttggcgataaggatgctggcgtcgccggtcattccttcgcgcatggcgccaaaaacgccggtaccgctggcgcaaaacagcacgatgatcgccacgtagctctgaatataagactcgtgggccgaggcctttttcctgccctttggcgacaatagctgctggagtttgcttaccagggtattgatgcctttctccatattacacacttcgccgagcagcgcgccgaccagcgtcgccagcaccatcaccggcaggttggcgcacttgatgaccagtaaaataccaatccccagtgatgccagcccaaaaatcgaggtcatcgaggtgcggatccgttccggcaatcgttggctcagcagcgcgcccagtacgccgccgacaagcaccgcgctggcgttaataaatggccctataaccaaagtaaactcctgttaattattcctgatgtccgcattattatgacgttgtttcgccgctaaggcttgcggatacgtggggataatgcatatggatttcatcttgcgccactttcggaaaggtgccatgattgcgcggattttcacctctttaccctgaggccgccgggatgacgacatcgccattacatcgccgttgccgctgcgcattgctgcgcggtttgcctcgttccttactctccctgttcaccatgcggtgaaggccacgtatgctcactgtaggacaacagtaagatcggacgcgtctgcttttactgatgtccggcggtcggagctgaattccgtcagacccggacacctcgttgggcaaggctccacctttgcctgagatttttacactcccgatacgggcatttgcgcttatgaaatctatgcacattgccgccagctgcgagctggtctcccgtctgtccacccatcgtcaggttgtggcgctggacagcactgattttaccgatgcggcagcggtcgtcatcaccgcggcggatagccgcagcggtatcctggccctgctcaagcgcagcggattcaatctgccggtctatctatttagcgaaacgcaaacggataaaccggaaggagtcgtcgcggtgattagcggcaaagagcaggagtggctggagctggaagcggccgcctgcggctatgaagagaaactgctgccgccatttttcaatacgcttagccagtacgttgagatggacaacagcactttcgcctgtcccggccatcagcatggcgcgttctttaaaaagcatcccgcgggccgccagttctacgagtttttcggcgagaacgtttttcgcgctgacatgtgcaacgccgacgtcaagctcggcgatctgctgatccatgaaggttcggcgaagcacgcgcagaaatttgcggcaaaagtcttcaatgccgataaaacctacttcgtgcttaacggcacttccgcggcgaacaaggtcgtgaccaatgcgctgctgacccgcggcgatctggtactgttcgatcgcaacaaccataaatcaaaccaccatggtgcgctgatccaggccggggcaacgccggtctatctggaagccgcgcgcaacccgttcggctttatcggcggcatcgacgaccactgctttgatgaaacctacctgcgcgagctgatccgcgaagcggcgccggaaaaagccgacgcggcgcgcccgttccgcctggcggtgatccaactgggcacctatgacggcacggtgtataacgcgcgccaggtggtcgataaaatcggccatctctgcgattacatcctgtttgactcggcgtgggtcggttacgagcagtttatcccgatgatggctgactgctcgccgctgctgttggatctcaatgaaaacgatccgggcatttttgtgacgcaatcggtgcataagcaacaggccggtttttcgcagacctcgcaaattcacaagaaggataaccatctgcgcggccaggcgcgtttctgcccgcataagcggctgaataacgcctttatgttgcatgcttccaccagtccgttttatccgctgttcgcctcgctcgatgtgaatgccaaaatccatgaaggagagagcggtcggcggctgtgggcggagtgcgtggagctgggtatcgaagcgcgtaaagcgatactagcgcagtgtaaattattgcggccatttgtgccgccgctggtcggcgggaaaccgtggcaggagcattcgacggcgactatcgccagcgaacgtcgcttctttagcttcgagccgggcgcgagctggcacggctttagcggttatgctgacaatcaatactttgtcgatccgtgtaagctgctgctgaccacgccgggcatcgatgccgatagcggcgactataccgagtttggcatcccggcgaccatcctggcgcactacctgcgcgaaaacggcatcgtgccggagaagtgcgatctcaactcgattttgttcctgctgacgccggcggaaagcgcggaaaaactggcgcgactggtggcgatgctggcccagttcgaacagcatatcgaagcggattcgccgctcgccgaggtactgccgactatttacaacaaatacccggttcgctaccgcgattacaccattcgccagctgtgtcaggaaatgcacgatctgtacgtcagttttgatgttaaagacctgcaaaaggcgatgttccgcaagcagagtttcccgccggtggtgatgaacccgcaggacgccaaccgtgaatttatccgcggtaacgttgagttagtgcgcctgagcgaggccgaaggccgcatcgcggcggaaggggcgctaccgtatccgccgggcgtgctgtgcgtggtgccgggcgaactctggggcggcgcggtgctgcgctacttcctcgcgctggaagagggggtcaatatgctgccgggcttttcgccggagctgcagggggtttatagcgaaacggatgccgatggtattaagcggttgtatgggtatgtgttgaagaaataaaaaaacgccccgccgaacaggcggggcgttttgcttttgccaatcaggcgttctggcgcgcggcggtaggctgtctgacgtgttgatacttgaacagcgccacgaaagcgacggccagcaccagcgagtaggcggcgaaaatcagccacacgctttgccagttagtgatcccctcaacggtaaagtgctcgacaactttgccgctcaccatcccaccaaggatacagccgaagccgttggtcatcatcaggaacattccctgggcgctggcgcggatttccggacgcacctctttctcaacgaacactgaaccggagatgttgaagaaatcgaaggcgcagccgtagacgatcatcgacagtaccagcagcacggtaccgaacggcgtcgggtcgccgaaggcgaacaggccgaagcgcagcatccacgccacgatactaatcagcatcacgttcttaatgccgtagcggctaaggaagaacgggatggtcaggataaacagcgtttcggagatctgcgaaatcgacatcaataccgacgcgtgctcgacgataaagctgccggagaacagcgggtctttatcgaagctgtgcaggaaagtgttgccaaacatattggtgatctgcagttcggcgccgagcatcatggagaagataaagaagattgccatacgcttgtttttaaacagcgcaaaggcgttcaggccgagcatctcggtccagctctggttgcgctgggcgttggcgaccggaatatgcggcagcgtcagggtgaacagcgccagcaagaccgacagcgtcgcgccgatataaagctgcatatggctaagctcgaagcccgagaagctgacgccccacatggcgaggataaagccgatggtgccccagatacgaattggcgggaaatcggtcacgatatccagccccgccgactgcaggcggtagtaggaaatggtgttgatcaagccaagcgtcggcatataggccagcgagttaagcaagatcacgaggaacatctcgcctggcgtggtgacctgcgccgcgaggtacagcgttaacgcgccgaccaggtggcagatggcatacacccatttggcgctgatccatttatcggcgacgatcccgagcagcgtcggcatcagaacggcagcgatgccgagcgagctatacaccgcgccgatggccgcgccgtcaaacttcagggtgacgaacatgtaagagccgagcgtggtcagccagctcccccaaaggcagaactgcaggaacgacagtatttttaactgcagcttaagattcatgtatttatcctcacgaatgtgggctggtgatgttttttaaataacataaccaccgttattttgatgcgattctatcattcaccggttgaaggcttctgttaactgccgcagaaaatcgaaagatattacgaagtatgtcgtaaaaaagagaggcccggcgagatgtccgggcctgggtgaaagaagcgttacttacggcggtagcttttctgcgcggtattcactttatacagataccggcgcgattctgccgacggatggcgggtggtgagcgtctggtagacgtcgcctggcgccatgctgttaatgatgttcgccgcctggactttatcgctggagaagacgcgcagtacgctgccggcgccgccgttataggcggtgatcaccgcgtagcgacgcgaggtggggttatcgatgccggcgagataaacgttgttcagcatcgccagataggcggtaccggtatcgatgttattcgccgggtcaaacagatagctgcggctcggcaggccggatttgccctgcgagcggaagacgtctttccccgcgctatgctgtacgacctgcatcagccccatggcatccgcgtggctcaccgcataggggttaaacgatgattctgtttgcataatcgcaaggatcagcgactcatcaacgccatatttacgcgaggcctggcgcaccatgccgagatatttatgcgcacgtttatcgaggtggttaggcaccaggttgatggtgatgctatagaccacgcgcaggccattgctgcggctcttcaggcgggtttgcagcagataatcggcatagcgcgcggcgcgccactcccagcggatggattcgccggtgttatcgacgacctggccgtagaggaacggttctttggaaatctgaatatcatcgacatcggaatagaggtcgatagagttggggtcatcgcccatcaacagagttttgataatcgcctggcgtaaccgtccttgcggatcggttccggcgatggtctcgacggtaatcgtaccggcatcaaagttgatgtggctgcgggtttgatattgatcggtatattttacgtagtccttcggcccggcgagcagaacttcgttatacccccaaatgttctcgatgttatgggcaaactggcccatcaggatatcgaatccgttagtgtccttgacccaggcctcgttatattcggcgccttttttattggaactggaacaggacacgagcaatggcgcaatcagcgcgagcgctaagtattttttcatcattccgggagtgcgtgttgtgtttgtttggtaaaggccgtgaggcccttactgtttttccggcggcgtgtagccttcgatgtgaacgtctttcccttcaaacaggaactgcaccatctcctgttccagcagcttgcggtgctccgggttcatcatgctgagttttttctcgttgatcagcatggtctgcttatgctgccactgcgcccaggcctctttggaaatttcgttgtaaatgcgcttaccgagctcgcccggatagagctggaaatcctggccgtccgcttcacgctgcaggaaagtacaaaaaatcgttctgctcataatcaatcctcttttatagccgaaaaaactagaccggcgttccggctttcaactgttgcaacaagcgctccacgggggccgccagtccgaccgatggcggctgcgctaagttataccagagtgcgttaccttcatccatgcatgcgccagatgagtgcactgtaagccacatcggcacaatatccaggtggaaatggctgaaagtgtggcggaaggcggttaattgcgtcagattatcggcctttatctgacgttgcgccagccactcacgcagcccggcttcatcctcaaattgcggaaaacagaacaacccgccccataaacccaccggcggacgttgggaaagaaatacctcgtcgccgtgctgcatcagcaggaagtagccggtgcgttccgggatggtctgcttcggttttttccccggatattccgcccatgaatggttagcgtaggccacgcagtcgttactcagcgggcacagttcgcacttcggcttcgagcgggtacaaaccatggcgccgagatccatcatcgcctggttgaagcgttctacgccctgcgccggcgtcacctcttcgcttatttcccacagccgtttttccacctcttttttccccggccagccgctgacagcatagcagcgggcgagtacccgcttcacgttgccgtcgagaatcggataatgctgaccgagcgaaagggataaaatagcccccgccgtcgagcgcccgacgccgggaagcgcggccacctcttcaaaggtttgcgggaactcgccgccgtgttgcgtggcgacctgctgcgcggctttatgtaagttgcgcgcccgcgcgtagtagccaaggccggtccacagatgcagcacttcatccagcggcgcgttggctaaatcaacaaccgttgggaaacgcgccataaagcgttcaaaatagggaataaccgtggtgacctgggtttgttgcaacatcacttcggagagccatactttgtagggcgtcttggcgatttgccagggcagggttttacggccgtatttgtcgtaccagtccaggacctgggctgaaaattgcgcggcgagaaaagtcaaagctacggctccggaatcgcgattacagggtggcagattgcagcacaagggcgagtggctgtaaacccttgcatccgccgggtaactttggataatgcccgttttccgaacacattcacaagcagacttaacttttatgaaaaacgacgtcatttctccggaattcgatgaaaacggtcgcccgctgcgccgtattcgtagcttcgtccgtcgccagggccgcctgacgaaagggcagcagcatgcgctggataacatttggccggtgatgggcgttgaattcaacgatgcgccgctcgatttcgccgccctgtttggccgcgaagcgccggtcaccttagaaattggtttcggcatgggcgcctcgctggtggcgatggcgaaagctaaaccggagcaaaatttcctcggtattgaagtgcactcgccgggcgtcggcgcgtgcctggcttccgcggaagaagaaggcgtacaaaacctgcgcgtaatgtgtcacgatgcggtcgaagtgctgcacactatgatcccggataactcgctgaatatggtgcagctgtttttccctgacccgtggcataaagcgcgtcataataaacgtcgtatcgtgcagccgcctttcgccgagctggtaaaaagcaaactgaagctgggcggcgtcttccatatggcgaccgactgggaagcctatgctgagcatatgctggaagtgatgtcttcgctggaaggctatcgtaaccggtcggaaagtaacgattacgtaccgcgcccggaatcgcgcccggtaaccaaatttgaacaacgtggccatcgtcttggccacggcgtatgggacttaatgttcgagagggtgaaataatggccaagaatcgtagccgtcgtctgcgtaaaaaaatgcatatcgacgaatttcaggagttaggtttctccgtagcctggcgtttcccggaagggaccagcgaagagcagatcgaccagacggtcaacgatctgatcgaagaggtcattgagccgaacaaactggcctttgacggcagcggctatctctcgtgggaagggctcatctgcatgcaggaaattggtaaatgcaccgaagagcatcaggccatcgttcgtaagtggctggaagatcgtaaattagcggatgtgcgcaccagcgaactttttgacgtctggtgggactaagtttgacaagggtcggcaattgccggcccgatttgtcttaagggagtaaaaagatgcgcaaaacgctgctggcggtggcgctttccgtcaccgctttgtctgcccacgcggactaccagtgtagcgtcacgccgcgtgacgatgtgatcctcagcccgcaacaggtgcaggtgaagggggaaaacggcgatctggtgattaagccggacggtaatctgacctttaacggtaaagcctatgcccttagcgccgcccagcgcgaacaggcgcaagattatcaggccggtctgcgcagcagtctgccgtggattgatgatggcgcgcgctcgcgcgtcgaaaagggccgcaaggcgctggataaaatcatcaccgaacaggtcggcgccagcagcagtatgcatagccgcctgaccaagctggacgcgcagctgaaagaacagatgaaccgcattatcgaacgtcgcagcgatggcctgactttccactataaagctatcgaccaggttcgcgccgatggccaacaactggtgaatcaggcgatgggcggcattctgcaggacagcattaacgagatgggcgccaaagcggtgcttaaaggtggcggcaatccgctgcagggcattctcggcagtcttggcggcctgcaaaccgcaatccaggatgagtggaaaaaccaggaagcggatttccagcagttcggcaaagatgtttgcagccgggtggtctcgctggaagagagccgcaaagcgctggttggttcgttaaagtaagcaagatttcgcggcccgcatttctttgggccgcgcacttatccactcaggcgcggccgtgcgacacgcgtgaacggcgagccagagaatcaatgattaccgcaatcgccagtaccgcgccggtaatgatatagcgcagcgaagacggcaggttcaacagcgtcagcccatttgaaatcgactgaatcacgatgatccccaatagcgcggaccaggcgctgccgcgtccgccgaacaggctggtgccgccgatcaccgccgcggcgatggcgttgaggttgacgtcgccggtgccggcctgctggctggcggaagccagtcgtgacgccgcgagaatgccgccgaaggtcgcaagcgtggtacacagaacaaaagcgctcacataaatcgcccgcacgttaattcccgaacggcgcgccgcttcacggttgccgccgaccgcgaacatcgagcgaccccattttgtccgtttcagcgcgtagttgaggatcatcacgcaggcgacaaagagaccgaaaatccacggaataccgcgcccctgattgaggtaaagcaccgcggcctcgaagataatcgtcagcgcgatcgcgcgcgccagtagcgagctgactccctcggcggaaagattggccgccagccgccgcgagcgttttttcagaccaaagacaataatcgccagtcctggcagcaatgccatcaggtgtgagaaccagccgggcatcaccagcagttggccaaagcgcaccagcggcgaagtatagggcaggttgatgctgccgcttggcccgaggatatacagttgcatgcccagcagcgccagcaggccggcgagagtggcgacgaaacttggcattccgacgcgggtatacagtagcgcgtagaccagcccgacggccacgccgcaggccagcgccacggcgatggctcccgccagcggccatcctgcgttcacccacagcacgccgacgatagccgatgccaggccgctcatggagccgaccgacaggtctatctcgccaagcatcagcacgcagacgatgccgagcgagataaatccgaccgtcgcgcagtcaaacagcaggttcaccaggttattcggcgcgatatagaccgggttgagaaaggtgaaaaccagggaaatcacaatcagcccggctatcaccggcgcggtgccgagatcgccggttttgatgcgggttatctgcgcgcgcagggcgccaaacagcccctcgtcgtgacgaacgcgctcatcgctgcgatccagcgcggtgtgggatgcggtcttactgttcataaaattacatcgctccggaagttgttggctgtgatttacgttcaacccggcgtgaaacggcgttttccgtcgcgccggtgatcgcggcgaccagatcctgattggaagcatcgggcgtgaagatccctttgttgcgcccgagacgtagcaccacgatacggtcggcgacggcgcgaacgtcttccatgttgtggctgatgatgatgacgccaagcccgcgctcgcgaacgcgctcaatcaggttgagtacttccgcggtctgcgcgacgcccagcgccgcggtgggctcatcgagcataatgattttagggttcagcagcagcgaacgggcgatggcgacggtctgccgctggccgccggaaagcgatgccaccggttcgcgtaccgacggaattcgtgccgccagctcctgcagcagcgtccaggctttcacttccatcgccacttcatcgagctggaacggcgaaatttcatgacccagaaacaggtttgccaccacatcaaggttttcacacagcgccagatcctgaaacaccgtggcaataccgtattccagcgccttgccggggctatcgagggtgacggggttgccgtcaaactcaatggtgccggaggtcggctggtggacgccggcgaggatcttcaccagcgtggatttgcccgcgccgttgtcgccgaccagcgcgactacctcgccggcgtggacttctaattcgatatccgtcagcgcggacaccgcgccaaaatgtttagagacgttgcgcagttgcagtattggccgcccggcggcggagttgtgttgttgttgcggcatacaaaacgacctcaatcatggcgaaatcgcgcccgccgcggcgggcgcaggggcaaaggttacttgctgatgcctaacttctggcaggcggcggcgtactcgccgctacacacctgatcccaggtctggatttttttatcgaagatttccgctttgatgtttttggccgtcaccacttccggggtaaatagctgggaaggggtgttgtacagggtggtgctggcctgcggttttttgccctgaataaaatcaaccgccactttggccgccgccgcggcgacgatctccgatggcttggagatggtgttgtactggtcgccggcgatgatcagctgcagcgcggcgatagtggcgtcattgccggtgaccggcggcagcggctggaccccggcagccttaaaggcggcaattgcgccgccgccggtaccgtcgtttgccgcgaccacgcccttaattttgtcgccaaagcgggtaacctgcccggcggtccactcctgggctttcggcggcgcccactccggggtgtcgaattcggccagcgttttgtaaccggactctttcaatccgcgatggataccgtcgcggatcagccctgcggcggcatcggttggcgaaccgttaatttgcagcacgccggcatcctgcggcacgccgctcgctttcaggtggtcggtgagggatttcgcgatggcgtagccaatgccctcgttatcaaacgaaacataaaaatcggccggtttgtttggcaccgggcggtcataggcgatgaccttgaccccctgcgcctgggcgttttcgaccagcgcggcggcggcggaagaatcaaccggatccaggacgatcactttcgctccctgggcgattactgagttgaactgctgctgctggagcgacgcgttggcgttggcattctgatagatgaccttacattccgcgcaaagcttgctcatttccgccttaaaaccggggaagtcgtgctgctcatagcgggtagaggcctgatcgggcattaaaaaggccacggtggcggactctgcagaccaggctgaagccgtgacggtgccggatagtgcggcgagtgtgataaatatattacggtaattcattgtgttaccctcttttttataggcttaagcccgccgggttgcgacgacgttacagagactttttttaatcagagttaccaataattcacatgtaggatacgtcggttttacatttgctcaaccgatgaagcaggattaccactgcgcaaaaaatgagtcaagaaaaggaaaaaagtcgatcggattttgtgattcgctgcaaataagtgaacaaaaaaacgccagtcgatttgaccgtggcgggagaggatgtaaggggaaagatacgggcgacgacgtgccgcccgcagggattactcttcgctgaggaacagctccagcagcgaatttaaaaacagtttaccgtgctcggtaatttgccagttttgcagatcttccagcagatagccttcggcgatagcggcatcgatttgcggacggataacctgctcatcaaggccggtatacaagctgaactccgcgcgcggcgcggcctccagcaggcggaagcggttcataaagaactcgaacggtttatccgccgcgtccacgtcgtgctggcgctccaggtaacggctttccatgtagccgcgcgggtgacgggttttcgccgtacgcagaatgcggccatcagggaaggtcactttgccgtgtgcgccgcagccaatacccagataatcgccaaagcgccagtagttgagattgtgctggcactgatagcctggtttggcgtaagcggaggtctcgtactgctgataacctgcggcgctcagcaattgatgcccctgctcgaaaatatcccacagcgcatcgtcatccggtaataccggcgggcgcgaaccaaacagcgtgttcggctcaatagtcaactgataccacgacagatgcggcggattcagcgcgatcgcctggcgtaagtcatccagcgcttcttccagcgactggtccggcaggccatgcattaaatcgaggttaaagctacgcagcccgaggccgctcgccagccgcgccgcgcgttttgcctcttccggaccgtgaatacgccccagacgctgcaatttgggctcgctaaagctctgtacgccgatggagatacggttgaccccggcacgctgatactcaacgaagcgatcggcctccacggtccccggattggcttccatggtgatctccgcatccgccgccagcggcaggcaggcgcgcacgccatccagcagggtttgcatcgccgggccggaaagcaggcttggcgtaccgccgccgataaaaatagtcttaatttcacgtccttgtgcgtatggcgcatcgtggcgcagatcggcaagcaggtgctggacgtagtcgtcgtgcggcacttcgccctttaacgcatgcgaattgaaatcgcagtacgggcacttctgcacgcaccacgggatatgaatataaagactgagaggcggcaaattagccattacgtaatgcttccagtaacagtttcagcgcctgcccacggtgggaaatggcgcttttctcttcacggctcagttccgctgcggttttaccctcggacggaacaaagaaaatcgggtcataaccaaagccgccgctacccgccgcctggcgagtaatcacgcccggccagctgccgtggcacaccagcggtgtcgggtcttcggcatggcgcagatacaccagcacgcagtggaactgggcctggcgttgctcatcgggcacgtcctgcagggcatccagcagcttttccagattctgctggtcgctggcgttttcacccgagtagcgagcggagtaaatgcccggcgcgccgcccagcgcatccaccgccagacccgagtcgtcggcgatggccggcaggccggtgacctgcgcggcgtgacgcgctttgaggatcgcgttttcgataaaggtcaggccggtttcttcggcggaatcgaccccaagctcggtctgggcgacgacgtcgagcccaaaatcttccagcagcgaggccagctcgcgaactttaccggcgttgccggtagcgagtacaactttttgcatattcaatcctgtttagtcagtcagcgccgcgacggcgggcgggatctgctgcgggtgaatgatttttacctgtttgtgacggcccagttcgcctttttcgataagcacctggcttttcgcgacgcggaactgtttagcgagatatttaaccagatgggcatttgcctggccgtcgacgggtggggcggtgatggcgactttgagctcgtcgccatgcagaccaacaaggctgtcgcggctggcctttggctgaatatacagcctgagcaccagcccgtcagcgcagacttcaacggcactcatagcgccatccacagccccggaagcaggacattgccagtagcttgcagcagctcggcgatacccatgttaatcacgtacagcagcaggaccagcaccatcggcgaaaagtcgatgccgcccatggatggcagcaggttgcggatcgggcgcagcagtgggtcggccaactgcatcagcacgtattccaccgggctgcgaccctggcttacccagctcatgatcgccatcaatagcagcacccagaaaatcagcgaaccgatggttttcagcaggatcagcaccgcggcaatccagataatcggctggaaggtgaccaccataaacagcacgatagccttgataacgcatagcacgaaggcgaccagcagggaggcgctatccagcggccccattgccggaataatccggcgcagcggcccgacgattggctgggtcgctttcacgacgaactgtgaaaacggattgtaaaagtcgcagcgcgcccactgcatccagacgcgtaacaacatgaccattgtgtagagctcaatgaccgttgagagcaggaaggtcaacgtcttcatggcgttcctcagattccttattttttgctgtagtcgcgcgcgccgaagattgcggtcccgatgcgcaccatagtgcttcccgccgcgatagcggcttccatgtcatccgacatgcccagagagagcgtatcaaccgaagggtagagcgttttcagttgcgcgaatgctaccgccatttgttgggcgacggcaaactgcctttcatactctgactctggcgccggaatggccattaacccgcgaagctggaggttcggtaaggcggcgacgccggcggctaaagcgtcaagctccgccagcgggatcccggatttactctgttcatcgctgatgttgatttgaatcagcacgttcagcggcggtaaatccgccggacgttgctcgctcaggcgggtggcgattttcaaccggtcgacggtgtggcaccagtcaaaatgttcggccaccagccggcttttgttggactgcagcgggccgatgaagtgccactgcagaccgctggcgcccgcctgctggaaatagcggattttatccaccccttcctggacgtagttttcgccgaatgcccgctgtcctgcggccattgcttcttcgatagcgctcgcaggtttggttttactcactgcaagcaacgtaacttcttctgaagcgcggccgcagcgggcggcggcgcctgagattttatcccggacctgtgccaggttatgcgcaatatcgttcatattccgaggatcagttatggagctggaagaaatcgtggcccttagtgtaaagcataacgtctccgatctacacctgtgcagcgcgtatccgccgcgctggcgtcgtttgggaaagcttgagcctgcaccgtttacttcgccggatgttgaggaaatcctcactcgctggcttaacgacccacagttggcgcagtggcgtgccgatggccaggtggactttgccctggccctttcagatgggccgcggctgcgtgccagcgcttttgcccacgcgcgcggcttgtcgttggcgctgcgtcttttgccgcagcgatgcccgcagttgggggatttgggcgcgcccgccgcgcttagcgaactgttaaatgaagagagtggtttgatcctggttaccggcgctaccggtagcggcaagtcgaccaccctggcggcgatggtggactacctcaatcaacatcgccatggtcatattttaacccttgaggatcccgtggagtttattcacgccagcaggaactgcctgatccagcagcgcgaaatcggccgccattgctcctccttcgcggcggcgctacgcgtggcgctgcgtcaggacccggacgtgatcttattaggtgagctgcgcgatagcgaaaccatccgcctggcgctgaccgcggccgaaaccgggcacctggtgatggcgacgctgcatacccgcagcgcggcgcaggccgtcgagcggctggtggatgtgttcccggcggaagaaaaagagccggttcgcagtcagctggcagggagtttatgcgccgtggcggcgcaaaaattgttgccaaatgcttccggtggccgggttgcgctatacgaacttttagtgaacacgccagcggtggcaaatttgatccgcgaaggaaaaacgcatcagctacccggcgtgatgcaaaccagtcaacaggcaggaatgcaaacctttgcgcagagttttcaacaacgtgcgttagcaggtgagttatagcccatgccgtgatgaaacaaaggtggtattcattaaattgttaattcagtgttcaattaatgttttgattaatgatttcataatacaaataagtggtacgacctaagccgaaataatgaatgttatgacagcgggcttacatttaccccacttaaccaggaaaaaaatgggattaccttttgacacttttacggggttcgatttatgctgtttacgggaataggaagattctcatgaaatgatgtttcaatatccaaactgtatttgaaaatataaatacattattgaacgtttaattttcagttaatttaaccgctaagatggcggggtactgctaaggagagtttcaagtgattaatttatcggagaatttactgcattcgcgtcaggtgactttcattactcatccgtccattcagagtaatgcatttgcgacgtggttgactgagaagctatccgtaaacgtaactctgcataatatcaacaaaccgctaactcaacgtctggcaaaagactctgtaatattgtttgatattgccgtctctaataagaaattgaatggcgtgtggcgagatattattcgcgtacaggcagataatccgcgtctgttgattatcaatagcgcgcaaaagtatgagctttacgaaatggcgcaatggcctgcgttatatggcgtattccgccatgacgatgaccaatcgcgcttaattgagggcgtcaaagccgtattaaatggcgagcagacggctgaattgagcgtgatgcacccggcgctgtattctgcggatcaggtcacggcgccgacggagaactcaccgttgaccgagcgtgaatgtgagatcctcaacgagctgcgctgcggcgcaacgaatatggatattgcccgcgcgctgttcatcagcgaaaacacggtacgtactcatctgtacaatgtgttccgaaaattgagcgtcaagaaccgtacccaggcggtaagctgggcgaatgaacatctgcgtcactgattgcccggcggcgctacgcttgcgatggcctacgggttatgccagcgagggagttgtaggccgggtaaggcgaagccgccacccggcgcaaaagcggctccgcatccgctgccatgattgcccggcggcgctacgcttgcgcgggcctacgggttactccagcggggggttgtaggccgggtaaggcgaagccgccacccggcgcaaacgcgaatctatgcttcgctttcatcccagagctaccgatcagtatccctgttcgaaatagctttcgaggataaccacggcagaggcggaatcaacgctgcctttattgagcgcgcgaaaacctccgtgttcgaacagccctgcgcgggcttcgacggtgcttaaacgctcgtcgtggagggtgattttcacgccgaagcggccatgaattttattggcgaagttacgtgcgcgcgcggttagcggctgttcggtgccgtccatgttcagcggcaggccgacaatcaccgcttccggctgccactctttcaacagcttttcgatgatgttccagtccggtttgccgtcctgcgctttcagcgccgggagcggacgcgccgtgccggtaatgcgctgcccaacggcgacgccaatgcttttagtgccaaaatcaaaactcagaaaggtaccgctcattatgcatgccccgcgtcggcaggcatcgtcacgatatcgataccgataagtttggccgcttcgcgccagcggtcggcaatcggcgttttaaacaaaatattctgatcggccggtgcggtaagccaggcgttatcgagaatttcctgttccagttgccctttttcccacgacgcgtagcccaacgccaccagcacgttgctcggttgtttatcggtaccgagggtttccagcacgtcgcgtgaggtggtaatcaccgtgttgtcggagatacggatgctggaggaaaaatcagacggcggcgtatgcagaataaaaccgcgatcctccgccagcgggccgccgaccatcaccggcttatccaggcggatatccgggttgcgcggttgcggcgcgattttcaatttttccaggatcccttccacctgcaaattttccagcggcttattgatgataatgcccatggcgccatcgtcgttgtactcgcagatatagacgacggagcgacggaaaagagggtcctgtagcgcaggcatggcaatcagaaagtgatgctgtaaattcattgtcagaggttctgttcctggtttaaaaaaacaacacccagtatgcgggtaaagtagaaacgtgtcgatgcactttgtttttactggcgccagaggggagccttgcgggcgggcgtttgcccgccccagtgcttatttgttgatacgtttttcgatggcgtccatcagcatgccggtaatcgacacatccgggaaagcggcttcgatttcgcgcacgcaggtcgggctggtaacgttaatctcggtcaggcgatcgccgatgatgtccaggccgacgaagataaggcctttagctttcagcgttgggccaacgcggcgggcgatttcccagtcgctttcggtcagcggacgcgcttcgccacgaccaccggcagccaggttgccgcgcgtttcaccgccctgcgggatacgcgccaggcagtatggtaccggctcgccgtctaccaccagcactcgtttgtcgccgtctttgatggccggcagataattctgcgccatgcagtagcggctacccaattcagtcagggtttcggaaatgacgccgaggttcgggtcgcccgctttcacgcggaagattgaggcgccgcccatgccgtccagcggtttgagaataatatcgccgtgtttttcccaaaacgctttcaactgggctttattacgggtgaccagcgtttccggggttagatcggagaaccaggcggtaaacagcttctcgttacagtcgcgcaggctctgcggcttgttgacgataagcgtacctttctcttccgcgcgttcgagaatgtaggtggcgtagataaactcggtatcgaacggcgggtctttacgcatcaggataacgtcgagatccgccagcggcaggtcctgttcgccggtgaacgcgtaccatttgtcgtaattctgctcgacgctcagtgtgcgcgtacgggcgcgggattcgccgttgatgagatacaggtcgttcatctccatgtaatggagttcatagccgcgacgctgcgcttccagcaacatagcgaagctggtgtcttttttgatgttgatggatgcgatagggtccatcacgatgccgagcttgatcattcttttctccattagcgctgtcgtgtttgcggaacgttgcgccagattttagcccagatcgccaaaacgcacctgcagcgcggtgatggcggtgagcgcggtggtctcagtacgcagaacgcgcggtcccaacaggatatcagtaaactgatagcgagcggtcatcgctatctcttccgccgacagaccgccttccgggccaatcagcaggcgaacacgttcaaccggcagcggcagcgtattgatgctggcgctggcgcgcgggtgcaggttgagcttgaggccgttttcttcctcggcgcaccaggcttccagctgcatcgccgggcgaatctccggcacgatgttacggccgctctgttcgcaggcggcaatagcgattttctgccactgctgaatcttcttctgcaagcgttcggcatccagtttaacgccgcagcgctcggaaaacagtggcgttatgaggcttacgccaagttcgatcgatttctggatggtgaattccattttttcgccgcgtgacatcacctggccgagatggatgtgcagcggtgattcacgatcgtcgatctggccacggataacctcgaccatgacgtttttcttacccgcttcggtgatgaccgcgtcaaaaacctgattgctgccgtcaaacagctggatttcctgacctttgctcatgcgcaggacgcggccaacgtggtttgccgcgtcttcgctgagggcaatgtggctgccgggggtaatgcgttccgggtggtggatgcgaggaatgcgcatgcttgatattccgttcttcgcgcagatagcgtcttcccctgagcggggaagacggcggctgcaaattaacaattgccgctagtgtaggttagctcttttgcgcctggcaagcctgctggacgtaaggattatggttgccctgtactttggcgattcgctcatcgcgctcgcactcccaggaggtgactggatactgcttatcccaggcggtaaatagctgggtttgctggcgggaaagagtcagctgatagcggtcgcgcatatagaagtaggtgcgagcgatcgagccgcgggcgcgtaccggcggttcggcgactttatctttgaaatcgaccttcatggcgcattgaccatactgcccgtcgccgccgttccactggctgtacataaagttgccgcgatcgccattgacctcgccgaccgcaggctgcaggttatgcatatcgctttccatcttgcgatattccggatctttggcgcagtttttacgtccaccatcctgccagcactggcgctggtggccgaactgccacgccggaaccacatgttcccattcgacccggctggcgcggttctcgtttttacgcactttgtagccgcaagattccagatcgataacgccttttttaccctgccagtcgattttacaaccgcaataaaagtcgccggggacgtcggcatttacttttacgccagcggctttcgcctgggaaaaactatgaataccagctgccgcaagcgggccgctggctgccacgctgaacaacgcgacggcaaaaacatacatacgggacatcgtaaactccgtgtcaaaacgagcccgcaacgtagcgaatgagggtgtcagatgcaatcagtcagatcagaaagtttctaattaattccgatggttacttttccgccaccagcagatcgccgcagcgaacgcagcggtaggtggcttcaccgcgcaccacgcggttatggcgacggacggtgagctggtgctgctggcactggcagcgataggggaaggtgttctggcgtaccgaatcaagctcaaagcgatgggtgcggcgggcggggacgcccagcacgacctccatcatccatttccactctttaccgtgcggcgcgacgcggccaaagtgtttccacaccagcagatgcgccagttcgtgcggcaccacttcatcgataaacgcctgctgattttccagcaatagcactggattaaggcggatctcgtttttctcaagccacgcggtgcctgcggaggtgccgcgctgctgataaaccagcgtcggttccgcatagcggcgttccagcttgagattggctgtggcgagatgctcccgcaggctacgcatgacggcctgctggatagcgatgggaatacggggtgttttcatagcgccagaggatagtgcgccgcgcgggggagagcaagaagaagcttcctcccgaaggggaggaagcacagaggggattaatcgcgagcgccgatttcgcgcagcggacgtccctgcatcaggttgcgttcaatatgttccagcgagacgtttttggtttccggaatcagccagatagtcagcaggataaacagcacgttcagaccgccgtagacccagaaggtgttggcgctgccgagagagttcagcatggtcaggaaggtggcgccgacgatcatattggcaatccagttggtcgcggtggagcaggtgataccgaaatcgcggcctttcagcggctggatttccgaacacagtacccaaatcagcgggccggcgctcatcgcgaagccgacgataaacatcagcagcatcagtaccgcgaagtactgtgcggtagcagaatgaataccgatatgcatcatgctgcccagtacgcccataccggcggccatcacgataaagccgaggatcagcgtcggtttgcggccccagcggtcgaccaggccgatagcgataaaggtggccagtacgttggtcaggccgacgatcacggtgccccacatttgctcagtggtattggcatagcccgccagttcaaaaatcttcggcgcatagtacatgatgacgttcatcccggtgaattgttgcatgatctgcagcaggacgccgaggaacaccgcacggcggaagttgctgttctctttgaacagcgcccagccggactgtttgactttcaggctttcgcggatttcatcgagctcgcgtttggcttcggcgctggtatctcgcaggcgcagcaggacgcgctcggcatcgacgaaacggcgtttagcggcaaaccagcgcgggctatccggcaggaagataacgccgatcagcagcaggactgccgggatgataatcacgccgagcatccagcgccacgcgccgctatagctgaaggcggtatcggaaagataggcgccgagaataccgatggtaatcatcaactggtacatcgaaatcatactgccgcggattttctccggcgcgatttccgacaagtatagcggcgcggtgtaagaggcgacgccaaccgccagccccagcaatacgcgggaaattagcaggatttcgacgttcggcgcggcggcggaaaatagcgagcccgcaacgaacaggatcgcaccgatcatcagactttttttacgccccagtttaaaggagagccagccgctgcccactgcgccgacggcggcgccgaacatcatggagctgaccacccactcctgggtgtgtgcgctgatttggaattcattggcaatgaacggtaaggcgccggcaataacgccgatatcaaggccgaacagtaagccggccagcgcggcgaggaaacagacaaagaacgtcatcgtcttgtttgaacgcccttgttttttattgtcaggcataacgccctccagttgagttattgattctgtcgatgcttagagtaggggagtgcaggacaaaaaaacgtgattacaatcacgactgtgtaatcggttacactaaggtaaagatatgtaatcagcaaaaacatattcaaatcatagatataaaaggcaattatcgccaataagattgcgctgaaacggtgaaattcgacatggtatgtaacattgtgaaaagaattggcgtcaacagaaagctcagttacgccaggctctataacagatatgtaatcgcttccattatctatggcctgcatgacaaaaaaagggcaggaagcgttagatgtggggaatgaggggcaacaaaaaggccagcgcggggctggccttaagtagtcaagcggggtggcttatttcaggccagccgcttcgcgcagcagggctgctttgtcggttttttcccatgggaaatgttcgcgaccaaagtgaccgtaagccgcggtctctttgtagatcgggtgcagcagatccagcatctgaatcaggccgtatggacgcaggtcgaagaactcgcgtaccagcagggtcagctgttcagaaggcactttttcggtgccgaaagtttctaccatgatcgaagtcggttcagcgacgccgatggcgtaggaaacctgaatctcacaacgatcggcaaggcctgcggcaacgatgtttttcgctacatagcgcgccgcgtaggctgcggaacggtcaactttagatggatctttaccggagaacgcgccgccgccgtggcgagccatgccgccgtaggtatcaacgatgatcttacgaccggtcagaccgcagtcgcccatcgggccgccgataacgaaacggccggtcgggttgatgaagaacttggtcgaagcgttcagccattcggtcggcagaatcggcttgatgatctcttccatcactgcttcctgcagggatttctgatcgatatcttcagcgtgctgagtagacagaactaccgcatcgatgccgacgattttgccgtcgtcatactggaaagtgacctggcttttcgcgtccggacgcagccacggcagggtgccgtttttgcggacttcagcctggcgctgtaccagacggtgagcataggtcaccggagccggcatcagcacgtcagtttcgttagtggcataaccaaacatcaggccctggtcgcccgcgccctgttccagcgggtcggcacggtcaacgccctggttgatgtccggggactgtttaccaatggcgctcaggacggcgcaagagttggcgtcaaagcccatatcggaatgcacgtagccaatttcacgcaccgtgttgcgggtgatctcttcgatatcaacccatgcgctggtggtgatttcaccgccaaccagaaccatgccggttttaacgtaggtttcgcaggctacgcgcgctttcggatcctgttcgaggatcgcgtccagcacggcatcggagatttggtcagcaattttgtctggatgcccttctgatacagactcggacgtaaagaggtgttttgccatgttttattttacctgtgagtattcgtgtagctcatactgttgtgtagagaggctttgatagatgaccctaccaaggcttgcaggtagtgacacgagcagtctgagtgttaatcagtatagatggattaacttctggatggctattttaggtcagaacttcatcgcatttccacatttttttgacatcacccgcattaatggaaaaagcgtggtggaaatttttcctgacaaccccggcaaggcgcgtatttttattttgcattttaccccgcttctcggtataaaacgccgcgcgcggctcattaaaaaagcgcacgaagccccatctcgtgacgccacttccagccgggttaagcactctgttacacagcggcggtttcgccggctgttcgatatgtatagctttggcttgtcgctggcctgttacggggcagtgtggaggtgataccagataatgaaccaacgtttttcgcctgattcgtcgcgtcgttctgtcgcgcaattctatcccgcaatctgcatctctttcgtgcaaacctgccgatgttctacccatctcggcgcttctcaggattccagggcctccaggctttttgaaaactgaacaagggcgctcttgcgtgagcaagggttttctcgtggtttctccgggctgtcacaccagcttcgggtacgtgttttactatatatgaataagaaaccggtcgcgcagctgcagtgccagcactatctgctgggattaaaggctgttcatgggttgttatcgcgtctgtcgactgcgatagtagttaatattacaagttgaggttcgctatgtctgacgacatgtctttgggttcgctttcgtcagcaggcgaacacggtgtactacgttccatgcaggaggttgcgatgagctcccaggaagccagcaaaatgctacgtacctacaatattgcctggtggggtaataactattacgacgttaacgaactgggccatatcagcgtttgcccggatcctgacgtcccggaagcgcgcgtcgacctggccgagctggtcaaagcgcgcgaagcccagggacaacgcctgccggcgctgttctgcttcccgcagatcctgcaacatcgtctgcgctcgattaacgccgccttcaagcgcgcgcgtgaatcctacggttataacggcgactatttccttgtctacccgatcaaggttaaccagcaccgtcgcgtgattgaatccttgatccactccggcgaaccgctggggttggaagccggttcgaaggctgaactgatggcggtgctggcgcacgcggggatgacccgtagcgtgatcgtctgcaacggttataaagatcgcgaatacatccgtctggcactggtgggtgagaagatgggccataaggtctatctggtcatcgagaagatgtcggaaatcgccatcgtgctggaagaggccgcccgtctgaacgtggtgccgcgccttggcgtgcgtgcgcgtctggcttcgcagggctccggtaaatggcagtcctccggcggtgagaaatccaaatttggcctcgcggcgacgcaggtgctgcaactggtcgaaattctgcgcgaggcaggccatcttgagagcctgcaactgctgcacttccacctcggctcgcagatggctaacattcgcgatatcgccaccggcgtgcgcgaatcggcgcgtttctacgtcgagctgcataagctgggcgtcaatattcagtgcttcgatgtcggcggcggtctgggcgtggactatgaagggacccgctcgcagtccgactgttcggtgaactacggcctgaatgagtacgccaacaatatcatctgggcgatcggcgatgcctgtgaagagaacggcctgccgcacccgacggtgattactgagtccggccgcgcggtgaccgcgcaccacaccgtactggtttccaacattatcggcgtcgagcgcaacgaatacaccgaggcgaccccgccggcggaagacgccgcgcgtccgctgcagagcatgtgggaaacctggctggagatgcacgaaaccggcaaccgccgctcgctgcgtgaatggctgcatgacagccaaatggatctgcacgatatccacatcggctactcctcaggcaccttcaacctgcaggagcgcgcgtgggcggaacagctgtatctgaacatgtgccatgaggtacaaaaacagctcgatccgagcaaccgcgcccatcgcccgattatcgatgagctgcaggaacgtatggcggataaaatctacgtcaacttctcgctgttccagtcgatgccggatgcctggggtatcgatcagctgttcccggtgatgccgctggaagggctgaacaagtcgccggaacgccgcgcggtgctgctggatattacctgcgactccgatggcgccatcgatcactatgttgacggcgacgggatcgccaccaccatgccgatgccggaatacgacccggagaacccgccaatgctgggcttctttatggttggcgcttatcaggagatcctcggcaacatgcacaacctgttcggcgacaccgaagcggtagacgtcttcgtcttcccggacggtagcgttgaggttgagctctccgatgagggcgatacggtggcggatatgctgcagtatgttcaactggatccgaatacgttgctgacccagttccgcgatcaggtgaaaaataccggcctcgacgccgagctgcagcagcagttcctcgaagagttcgaagcggggctatacgggtatacttatcttgaagatgagtaactaagagttatccgttggcgggccggtttatattcctgaaccggcccttttttataaatgaaatctgaaacatcatggtagctgctttttaaaatgacaaaggtccgtacactgccgcagggaattaacattcagcgaaacagggacggaatatgaaaagcataccgcgttacggtcttattatcggtttattatttttaagcggctgcgcaaaacagccggagtacaatacccgcacggcactctccactgaggttgccacccgctggggcagcgacgttcactcaacggttaaaggcgtgtctgcagaacgcgtagattcccatactgatgagatcgtattaattaattattccggtcaatatcaaaccgggtttgaccagcgctatagcattcgtaatagcgatctggaatatgcggtacgcgatgctaattttaactctctgcctattactcgccgctataataattccacgggaaaatggcaatacgccattgcggcccgcgttggtactcagtatcaattatatgtccgtaattatagccacagcgtggattatgaaattgtcgccacggtggatggtctcgatgtcctgagcggtaaggccggttcgcttaacaacaacggctacattgtgcctgctggtggctcgttagcgatcaaaggctttcgtaaaaacagccgtatcgaggcggcattcgaattttcaaacgtcgcgcaatcttatgccgcccattccgtacagggtgacacgcgtaacgttggagtcattggttttgcggccttcgctttacgtggaaaagagcaagcgtcgctaccgccgtgcgcgagccaggccttcccggcggacggtttcgccccggcgccttgtcaaaaataaacgtcccgcttgctgccgggcgtttttcgggcgataatttatgcccataagcagtaacccaattcaaacccttcctcgtcgggcctaacgacgcggaggggtttttttatacttattttttacgtaccacgactgcgaaaagaggtcatatccatgagcactttaggtcatcaatacgataactccctggtatccaacgcctttggtttcctgcgtctgccgatgaactttatgccgtatgaaagcgatgcggattgggtcatcaccggcgtgccgtttgatatggcgacctccgggcgcgcgggcggccgtcatggcccggcggcgatccgtcaggtgtcaaccaaccttgcctgggagcacaaccgtttcccatggaacttcgacatgcgcgaacgcctgaacgtcgtggactgcggcgatctggtctacgccttcggcgacgcccgcgaaatgagcgagaaactgcaggcgcacgcggagaaactgctggcggccggtaaacgcatgctctccttcggcggcgaccatttcgtcaccctgccgctgctgcgcgcccacgccaagcatttcggtaaaatggcgctggtacacttcgatgcccacaccgatacctacgccaacggctgtgaattcgaccacggcaccatgttctacaccgcgccgaacgaagggcttatcgatccgaaccactccgtgcagatcggtattcgtaccgaattcgataaagataacggttttaccgtgcttgatgcgggccaggttaacgaccgcagcgtcgatgacatcatcgctcaggtgaagcagatcgtcggcgatatgccggtgtacctgaccttcgatatcgactgcctggatccggcatttgcgccaggtaccggtacgccggtgatcggtggactcacctccgaccgtgcgatcaaactggtgcgcggcctgaaggatctgaacatcgtcgggatggacgtggttgaagtcgccccggcctatgaccagtccgaaatcaccgccctggcggcggcgactctggcgctggagatgctatacattcaggcagcgaagaaaggcgactaagcctatccccgtcatacttcaagttgcatgtgcgttggctttcctcgctcaccccagtcacttacttgagtaagctcctggggattctctgcgtcgccgccttcctgcaactcgaattatttaggggatagaggtatttactgctgctgcgcgacgcatgcgcagcagcagtacgccgccggcgcacagcgtgatcagctgcgatgccaccagaacggaaaaacctgaactgaccgatcccaccgatttcatcaccactcccatcagcagcggaataaacgccgcgcaaatattgccaatgccgttaatgatcccataggcgctgcccaccgcttcgcgcggggcgtgatgctgaaccaccgcggggatcgccgccccctgtaatccccagaaaacgttcgccgccagcataaacaacgccagcatcgccggctgctggctgagcatcagcgccagcacagaaccggcggtgagtaggccgccgataataaacagcagcggcgcctgctccgggcgcattttgtcgaggagcacgccgccaagaaactttgagccgaggcttaacagaaaggggacagccgccagcaggccggtggcctgtagcgagaagtggtgctcgtctcgcagccaggcgggcaaccaggcgctactcccccacagatagctgagtgtggcgatttctaccagcaggatccagccaagcagcggcgtacgccaggcgagggcgaaagtctgcctgaaacccggcttcgcgcgctgtgaggttacttgtggcgcggggagaaaccgccagattaatccgccgccgagtagcaggttaagcagcgccagcgcgtagaaggagccgatccagccaacgtgcgccatcagccaggtgaccagcgggaagcctaccgccagccccaacgatacgccaagggcggtcagcgcattcggcttgcctatttcatcagcggcgaagttgtcgttgataaagcgcgttttcagagagaacagcggcccctccgccacgccaagaacgatgcgcgcgatcaacattcccagcagtgagccgagtagcggggaaatggcgcacaccagcgcccatatcgcaatgctgcttaagagtccctgacgataatgccatctactttctataactggggttaataataatgccgaaaaaccataacccagaagaaagcatgtcattagcataccttgtaacattctgttttcatttaactgaaaatgggcagcgaattctgggttaaggatcatcaccgagatatttacccgatcgacgtaggaaataattattaacaaaagtaatgctattaccccttgccatcttgccgccattcgttgtctccatgcttaatttaatgattgccagttattattttttaacgccagaaatagttacatgagtaaaatggttcacctatgaaacccattgtttttaaatgattaaataaagatttgtttcatgggtgaaacaccatggtttccgctgttgcccatttttaatgatcgatttgaaaagaagtcaatagtcgtatgtgaaatttaaatcggcatttttatttataatggatcaccgctttaaatatcatcatttcatctgaatgcagtttttcgtgatcaattgcacacttagctaatttaaaagccattcattaacaagttcgtcacattaacgcttgacgaaacattcaccgcttttatattgaccgtattaaataagaaacagagtttcatatatgaaacaaaagcctggaggattgcgatgagctggataggcgtatgtgacgcggagcaagtacaggaagatttcccatatagcggcaatatcgacggtaaggaaatcggtatttatctgattgatggcgaatattacgcgctggaagacgtttgccctcatgcctatgcgctcctgagccagggctttgtcgaagatggcaaggtggaatgcccgctgcatgaggcggtattcgacgtgaaaaccggccagtgcctgcatggccccggcggtcgcaaccttaatcgttacccggtgcgggtatacgacaatcagatccagattacctttatcgaggagaacgtggcatgagcgaatccctggacttcaacccggcgctaccggaaagccgccagtttacgccaccggcggaaggcggaaatggcaatatccataagcctggcgactatcacaatctgatttggcaaacccgcagccgggtgccggaaaactgggaactgcagcttatcgccaccctggaaacgttgttcgagcagggcgcggaaagtctcggtgaactggtgaacggcctcaatggcgtcaggatgcatgaccaacagggcgaaccgtggagcgaaagcagcttccaggcatttttacaggttaacggctactgaggacacagcgatgacgacaacggtacaaaactatcttgataaaggactgcgcggcctgtggtatccggtgctggcgagctgggaagtgcagtctgcgccggtaggcattacccgtctcggcgagcagatcgtggtctggcggaataaagacggtcaggtgcaggcgctggaagatcgctgcccgcatcgcggcgcgcgcctgtcgatgggctggaacttaggcgatcgtatcgcctgctggtatcacggcgtggaagtcgccggcaacggcgaagtcaaagacgtcccggcggttgaccgctgcccgctggtcggccagcagtgcgtgcgcagctacaacgtgcaggaagcgcatggggcaatcttcctgtggttcggcgtcaccgccgaccagcagccggatgaactgagcttcccggaggaactggccaaccacgaaaaatacagtaacttcctgtgcaccgcggcgtggaaatgcaactaccagtacgcgctggaaaacgtgatggacccgatgcacggcacctatctgcactcatcatcgcattcgatggcggaaggcgatcgcaaagccgatatggtgctgcagccgacgaaaaccggctttatcttcgagaaaaaagggcagagcggcgtcaactttgactgggttgaactgggcaacagcggcgcctactggatgcgcctgtctattccgtacaaaaagcgtttcgggccgggcggccacttctggatcgtcggcatggtggttccggaagataacgacaactgccgcgtcttcttctggcgcatccgcggcgttcagggctggcagcgcgatctgtggcgctttatgtaccgcaaccgtctggaaaaactgcactgggaagtactggaacaggatcgcgtggtgctggaaagcctggcgccgaacgcccgcgatcatgaatatctctatcaacatgacgtcggtttgtcccgcctgcgccgcatgatgcagaaagcggcgaaagagcagttagcgcttcgcgaagcgcagcagggtgccgcctgatgaacggcctgctgaacggtaaacgtattgtcgtcaccggcgcggcgcgcggcctcggttaccactttgccgaatcctgcgccgcgcagggcgcgacggtggtgatgtgcgacatcctgcagggggagctggcggaaagcgctcatcgcctgcagcagaagggctatcagatcgaatcccacgccatcgatcttgccagtcaagcgtcgatcgagcaggtcttcagcgccatcggcgcgcaggggcctatcgatggcttagtcaataacgcggcgatggccaccggcgtcggcggtaaaaatatgatcgattacgatccggacctgtgggatcgggtgatgacggtcaacgttaaaggcacctggctggtgacccgcgctgcggtaccgctgctgcgggaaggcgcggcgatcgtcaacgtcgcttcggataccgcgctgtggggcgcgccgcggctgatggcctatgtcgccagtaagggcgcggtgattgcgatgacccgctccatggcccgcgagttgggtgaaaagcggatccgtatcaacgccatcgcgccgggactgacccgcgttgaggccacggaatacgttcccgccgagcgtcatcagctgtatgagaacggccgcgcgctcagcggcgcgcagcagccggaagatgtcaccggtagcgtggtctggctgctgagcgatctttcgcgctttatcactggccaactgatcccggtcaacggcggttttgtctttaactaacaagtgaggcggtatggcgaacgatcaggaagtgaagtaccaggtaccgggtctggagcgcggtttacaactgctgctggcgtttggcgaacagcatcgcgatctgacctttgccgagctgcatcggctggtggatatgccgaaggcgaccgcctatcgcgtggtgcagacgctggaatatatgggctttctcgagcgtaacgcccgaaccaataccttttcgctgggcatgaacgtactgcgtctgggctttgaatatatcgcctcactggatgtcgctcaggtgggtcagccggtcatcgagcaactacgcgatatcagccagtgcagcagccatctggcgatccgcgacggccgcgacattatctacatcgcccgcgtcagcgccgccggttcgcgtatcaaccaggtcagcgtcggaacgcggctaccggtgcactgcacctcgcttggccgcatgctgctgaccgatgtttcccgcagcgagtttgaacaattgttcccgaatgaacgtctgccgggcaatacgccgggccagctgtacgaccgcgaagcgctgtggcagatggtgcagcaggataaagcccgcggctacgtgattggcgaatcgttctatcgccacggcatctcatcgattgtctatccggtctttgaccgcagcggccgggtggcagcggtcgtcagcattctggtgccgtcggacgagatcccgcaaagcgatcgcgaacggttgcagaacgacgtccgtatggcggcggacaaaatttccggcttcctcggatatttgtcacaggcaagttaaatcaacaacttaacggcaggcgcttgattgcgtcgggcatgttttacgcccaaattcgggcgactgaacggtaaagaggcgacgaataatgagtattaccggaattgaaaagctggaatttggcgtagacgacctgaaccacagcgccaaatttatgcgcgattttggcctgaccggcgacgccagcggccgcgcgtttaccaccctcagcggcgcgcgggtcgaacttaacccgaccgatgccgccgatctcccgccagcctttgaggcgggcaacactctgcgtcgcatgacctggggcgtggcggatcgggcggcgctggatgcgctgcgcccgaagctggaacgccagcccggcttccgtgaaatcgacggcgcgctggagtgccgcgatcccaacggtatgacgctgcgggtacaggttagccagcaaacggcggtggaactgaacgttgaaccgatcaaccagtggggcgatgtgcgtcgcatcgacaccccgagcccggtgtacgaccgcgcgcagccgattaacgtcggccacgtggtgttcttcgtggaagaactggcggcggtggaaagtttctatcgcgaagtactcggcttccaggtgtcagaccgctacatcaatcgcgcggtgttcctgcgctgcggcgtgcgcggcggacaccataacctcttcttattgcagttgcccaaccgcaagcgcgggctaaaccacgtcgcgtttaccgtacgggatattcatgaagtgatcggcggcggcattgcgatgaataaaaacgcgtggagcacgtttatcggtcccggccgccatccggtctcctcggcctacttctggtatgtcaacagcccgaccggcggcgcttttgagtactacaccaacgatgactatctgacggaaaactggcagccgcgcgagctggagcattcactcgtgtcctttaccgaatgggcggtggaaggcggtatcgatcacgatacccgtcgccagcagaaaaaaccggaggcggtatgacggcgcggatagtcattatcggcggcggccaggctggcggctgggcagcgaaaacgctgcgtgatgaagggtttagcggcgagatttgcgtggttgccgaagagcaatgggatttttacgagcgcccgccgctgtcgaaagcggcattgctggaggccgaaccggcgctgccgcggttattcagcgccgaggcgcaacaggcgctggatctgcgctggtaccgcccgctgcgcgcggaatcgatcgaccggcaaaataaaaccctggcgctgagcaacggcgaaacgctggcgtacgaccaagtgctgatcgccaccggcggccgcgcgcgcctgccgtccgaggcctgggcgcagcatccgcaggtctataccctgcgccactggcaggacgcgcagcgtctgaagcagcggctggcatcggcaacgcggctggcgatcgtcggcggcggctggattggcctcgaaatcgccgcctcggcgcgcaaaagcggcgtagccgtgaccctttatgaacagcagccggctctgtgcatgcgctcggtcagtatggaggtctcgcaggcgctggatgagttgcatcgcgggcagggcgttgatattcgccgcggctgcggcgcgctggagctggaagatgataacggcctgccgacgctgcactgcgatggccagcgggaaaccttcgatgcggtggtggtggggatcggcgtcgatctgaatctcgaactggcgcgcgatgccgggctcactgtcgaacgcgggattgtcgttgatgcccaggggcgcagcagcgatccggcgattttcgccgccggcgatgtcgcccagcaccatcaatacggcctgtgcattcagtcgtgggcctttgcgcaaaatcaggccatcgcgacggcgaaagcgatgctcgatccgcaggccagcggctacgacgaggcgccgtggctgtggtcggatcaatacgatcgcaatatccagatcctggggatcccgcaggcgggcagccgcaccatcgtgcgtgacgagccgcagggcgcgctctacttctcgctgaatgccgatggacgtttaacgcaactggtggccttcaataatgcacgtaccgtgaagctggcgaagcgctggatggcggcggggagggatctctctgacgtcccgctcgctgacccgactttctcgctgatgtcattgcgataattaacgcgaacccttaagggggagaaatgaccacattagagactaacgccgcgcctgctgaggcgagcggcgagggcgtccgcacgcctgaaaaggcggttcgttgggccattccgctgtcgctgctggcctgcgtactgctggcgtttttcgacaaaattagcatcgccgcgctgttttccgatagccatttccagcaggcgatggggatcgatttcgataccactcggctgggtattctgatgagcgcctttctgttgagctacggcttctcgtcagtgttgttaagcggtcttggcgaccggattgcgccgctgcgcttgctaactggaatgatggtggtgtggtgcatcctgatggtgatcatgggtttcacccacaactacgcgctgatggtgacgctgcgcatcctgttgggcattgctgaagggccgctgttcccgttggcgttcgccgtggtgcgccacactttcccgcagcggctacaggcccgcgccaccatgctgtggctgctcggcacgccggttggcgcggcgctgggtttcccgctgtcaatttggctactcaataccttcggctggcagagcacctttttcgtgatggcgatgctgacggtaccggtgctgatttttgtgcgcatcgggctgcgcggcgtgcagctggaggcgaaagtcggcagcgataaaacgtcgcaggaagcacgccgcaacgcgcgtcgcgagctcttcgtgagtccgcatttctggatgatctgcattttcaacatcgcctttctcgcctatctgtgggggatcaatggctggttgccgggctacctgattaaaggcaaaggcattcatctggaacacgccggctggctgtcgtcgatgccgtttatcgccatgctgctgggcgaaattatcggcgcctggctgtccgaccgcgtcgataagcgcaccgccgcctgctttatttccctggcgggcgccggaatcgggctggcggcggtgatgcattttagcgcgccgttgccggtgatcgcggcgatgagctttagcacctttatgtggggcaccggcgcgccaaacattttcgcgctgctggctaaagcgacccatccacgggtcagcgccacggcgggtggaattttcaacgggctgggaaactttgccggggcgctatcgccggcggtgatgggcgcgcttatcgccttcacccatagcatggattccgggctgatttttctggcggtgatggcggcggtgggctgcgccctgttactgccgctgctgagacgttactgaggataaaacgatgactgattcaaccgtaactgcaaaacagagtttgaaacctgaccatctgacgatggaagagtgggtggagtcgcgtatcgcgcgctttgaaggccgtaaatacgactggaatgcgctgaaattccaggccgatttcgatccgaaatatcgccgcgcgcagatgcgctacatcggcaccggcgccaccggcgtcgccagtgataccaacaccgttccggccgagcacttcaccttctccaccatggtgttgccgtccaaatgtgaaggcccgctgcacctgcatgatgacgtagaagaggtgttcttcatgctcaaagggcagatcaccctgatgattcaggacggcgacaactataccgaaaccgtgctgcgcgaacgcgatctgatctcggtgccgcctggaatttaccgcggtttgtttaaccacggcgaagaagaggcgctgatgtgcgtgatgctcggcacccataagccgcatattccgacctacccggaagatcatccgctggcaaaagtaaaacgtaactaaggggcgatgatgacggggtttcgtgaacaaggaagcggtattccgctgacgctgctgcacggcatcagttccggcgcggcctcctggcataaacagatggcgctgcccggctaccgcgtgctggcctgggatatgcccggttatggcgaaagcccgatgctggcggcggcgccggcggatgccggtgattacgccgacgcgctggcgcgaatgctggaccgcgctggagtagagcaaaccgtactggtcggccattcgctgggcgcgctggtggcagccgccttcgccgcgaaatacccgcagagggtgctttacctggtgctcgccgacgtcgcgcagggctacggccaggcggaagccgcacagcgggaaaaagtctggcagggacgtcaacagcagatggcgctgggcggtgaggcgatggcgcaggggcgggcggcaaaactgctgcgccccggcgcgcgcgaagccgatgtggcgacggtggcggcaggtatgcgcaggctgcgtagcgaaggctatctcgccgccgcctggatgctggcgcatgacgacatccaccgctggcttgccgactatcgcggtcatctctcggtgtggtgcggcgagcaggatgccattacccaaccggagctggtgcagggagtggcgctgcgttacggcgctccttacatcgccatcccgcaggctggacatgccagctatctcgataacgaaaccttttttaatcaacagcttttacgcataggggaagaggtgcgcgatgaatgcacaaattgaaggacgcgtcgcggtagtcaccggcggctcgtcagggatcggctttgaaacgctgcgcctgctgctgggcgaaggggcgaaggtcgccttttgcggccgcaacccggatcggctggccagcgcccatgcggcgttgcaaaacgaatatccagaaggcgaggtgttctcctggcgctgcgacgtactgaatgaagcggaagttcaggccttcgctgacgcggtcgccacgcgtttcggcggcgccgacatgctgattaataacgccgggcagggctatgtcgcccacttcgccgatacgccgcgcgaggcctggctgcacgaagccgaactgaaactgttcggcgtgattaacccggtaaaggccttccagtcgcagcttgaacagtcggatatcgcctcgattacctgtgtgaactcgctgctggctctgcagccggaagagcacatgattgccacctctgctgcccgtgccgcgctgctcaatatgacgctgaccctgtcgaaagagctggtggagaaaggcatccgcgtgaattccatcctgctgggaatggtcgaatccgggcagtggcagcgccgtttcgaaaaccgcagcgataagagccagagctggccgcagtggaccgccgatatcgcccgcaaacgcgggatcccgatggcgcgcctcggcaaaccgcaggaaccggcacaggcgttgctattcctcgcttcgccgctggcctcctttatcaccggcgcggcgctggacgtttccggcggtttctgccgccatctgtaaggaaagatgatgaaaaaggtcatgttaatcggctatggcgcgatggctcaggcggtgattgaacgcctgccgccgcaggtgacgttgggttggatcgtcgcccgcgaatcgcatcatgcggcgatccgccagcagttcggccacgcggtgacgccgcttaccgatccgctgcagtgcgaagagacgccggatctggtgctggaatgcgccagccagcaggcggtcgcgcagtacggcgaagcggtgctgggacgcggctggcatctggcggtgatctcgaccggcgcgctggcggacagcgaactggaacagcgtttacgtcaggcgggcggcaagttgacgctgctggctggcgcagtagccgggattgacggcctggcggcggccaaagagggggggcttgaacgagtgacctatcagtcgcgtaaaagcccggccagctggcgcggcagctatgccgaacagcttatcgacctcagcgcggtcaatgaagcgcaaattttcttcgaaggcagcgcccgcgaggcggcgcggctattcccggcaaatgccaacgtggcggcaaccatcgcgctgggcggtatcggccttgacgcgacccgagtacagctgatggtcgatccggcgacgcaacgcaacacccatacgctacacgccgaaggattgttcggcgagtttcacctggagctgagcggcctgccgctcgccagcaatccgaaaacatcgaccctcgcggcactgagcgcggtacgcgcctgccgtgaactggcataacgcagagaggctgagatggacgaattagacatttttatcggcggccagtggcgtcgcggcggcggcaatttgatgcacagccagtttccggcggatggcgctattaacgcggcgctgcatgcggcaagcctcgatgatttacaggaggcgatcgactgcgccgaccgcgcctggcggcagccaacgtggcgggcgatgctgccgcatcagcgggcgaagatcctgcataaagtcgccgatctgattgaagcacagcttgatgcgctcacccaaaagcagagccgcgataacggtaaaccgctggcggaagcgcgagggctggtgatgagcgcggcggggacggcgcgctattttgccgccgcctgcgagttactggaaggcgagctgccgacgccgcggcaggcggatctattgactctgagccgctatgagccgttgggcgtggtggcggcgatcaccccatggaactcgccgatcgccagcgaaatgcagaaggtggccccggcgatcgccgccggaaatgcggtgatcctcaaaccggcggaagccacgccgctcatggcgctggagctggcgaagatctttgagcaggccggtttacccgccggactgctgagcgtgctgccgggtaaaggatcgattatcggcgatgcgctggcccgccatcctaaggtgcgcaaaatttcctttaccggcggcaccaccaccggacgtcacctggcgcacgtggcggcggaaaagctgatcccggcgtcgctggagctgggcggtaaatcaccgaccatcgtgctggaagatgccgatatcgaacaggcggcgcggggcatctgctacggcattttcagctccggcggccaggcctgcattgccggctcgcggctgtttgtccatgacaaagtgtatccgcaattaatggcccgcctgctggagttaacccaagggctgcgggttggtcatccgttcagcgctggcacccacgtcgggccgctaatcaacgataaacaccgccagagcgtgctggagtacgtcgagctggcgaaacgcgaaggcggcagcgtgctatgcggcggcgagatcccggcggatccggcgctggcggcggggagctatttcctgccgaccatcattgaagggctaaacaatcaagcccgcgtttgccaggaagagatcttcgggccggtgctggtggcaatgcgttttcacgatgaagcggcgttgatccgcgaggccaatgattcggtcttcggactggcggcggggatctggacgcgcgataccggtcgcgcgctgcgtctgagcgagcaactggaagccggtacggtgtggatcaacacctacaaagttttctccatttcgaccccgtttgggggctttaaagagagcggtctgggccgcgaaaaagggatccaggggctgaaagcctggatgcaacaaaagagcatttatctggcgacgggtaatagcgtcaaccactggtgcgactgagaaagggtgagcaatgagcgaaatgataaccgtcggcgatgccatcgccagaacgctggagcagtatcacgttgaagccatttatggcgtcatttctatccataacctgccgatcgccgacgccgtcggccagcgggaaaaaatccgctttgttccggcgcgcggtgaagcgggctcggtgaccatggctgacgcccacggccgtttttccgggctcggcgtggcgctgaccagtaccggcgcgggcgcgggtaatgcggtcggtgcgctggttgaggcgatgaacgccggtacgccgctgctgcacctgaccggacaggtcgaaaaagcctggctggacgccgacaccggttttattcatgaaacccgcgatcagttgaccttcctgaaagccagttcgaagcgcgcttaccgcattagcaacgccaaccaggcggtggctatcctgcataaggcgattcaggaggcgcagacgccgccgtgcggcccggtctcggtggaaattcccatcgatattcagagcgccaaaattccgctttcactgctgaccgcgccgttgaaacgcgctccggcggttgaaccggaagcgtcgctggtcgatgcgctgtgggcgcagcttaagcaggcgaagcagccgctgctgtggcttggcggcggcgcgttagagagcggcgaggcggtgaagacgctggcggatgccggggtgacggtgatttccagtacccacggccgcggcattctggcggacagccatcgcgccagcctacgcgcgtttcataattctccctcggttgaagcgctgatttcacaatgtgatttcacacttgtggccggttcccggctacgcagtaacgaaacgcgctcgtggacgctggaactgccaacgccgcgggtgcagattgatatcgacccggcggcggccagccgtaactacctgatggacaacacgctggtggcggactgccgcgctttattagacgcgctggcgaagcgagtacagggccggatgtggggcgatgcgcgttgggatagccagcttaaagcggcggtagaggcggcggagcaggggctgcgcgatcagtgcggcgcttacgctaaattgaatgacgcgattgcgcaggcgctgcccgatgacggcatcctggtgcgcgatattaccgtttccggcagcctgtggggcagccgtctgttccgcgctcacggcccgctgatgaatatccattctctggccggcgccatcggtatggggctaccgatggcggtgggcaccgcgattgccaatccgcaacggaaagtggtcggcctggtcggcgacggcggcctgagcctcaaccttggcgagctggcgaccctggcgcaggagaaggccaacgtgacgctgttgattatgaacgatggcggctacggcgtgatgcgcggtattcaggataagtactttggcggccgccagtattacaacgagctgcacacgccggactttaccctgttggcgcaggcgattggcctgcaggcgtggagcgtggaacgcgctgaggatttccaggcggtgatgaccgaagcgctggcgatgccggggccatcggtggtggaagtgaaaatgggccagattggcgcgctgcgctttgccggcccgccgcagaagacgctgtattaatataacccagtgaccccaaccctctcccttccggggagagggtaccgcacggcacagggggttaatcaaggcgccgcacggttgctcccgcgcgccgggagagggccggctcacaggagagggttcattacacggttaaaacacgttaaacggatattcgacgtagaaccgcacttcattaccgctgacgttatagtcgctggcgttgctggaaacgcgcagcaccgaatagcggagtctcaatttcaaatctttcgccatgccgttttgcacctggtactgcacctggttgaaccattcgtgttctttaccgttgctggtctcggcggttttaatgttatcgccgcgaacgtaggcggtggtccagctcaggcccggtacgcccagtccggcaaaatccaggccataggaggcctgccaggaacgctcatcctcgccgttaaaatcggaccagtaggagttagccagccagatggtgttgccgccatcgccaacgccgccctgattctgatacccgccgtagtggtagccggtgctgccgctgctttgctggtaagcgaccttaaaagtgtgaatatcccagatatagctggcggccaggctccagatgctgctgctgcgcccggtgtcattggcgtcggcatactcttgatctaagcgcgagttatagccattgaagtcaacaatcagctgctggtcggcggcgaacggctgcttgtagttcaggccgagatactgcttattcagcacgtcctcgacgtgcgaagcgtaaagcgcgccgctgagctggtcgttgaattgatagctggcgccgccaaaggtcaggctcttcaggccgctattgtggctgtcgtcgcttttgcgctgctgatcggtgagataaccggcgttaatttccagaccgtcgatttctcttgaggtcagcatggtaccggtatagctctcatacagcagccgcgagtcatcggcgtagacgatgggcagcatcgggcgctggctgccgtagctgagtacggtattcgagaagcgcattttagcggtagcgccaaattttgctaaatcggacttcgcgcggccatcatcatcctgggcgaaaaagtcgataccgcccgcgccgctgcggccgcggccgccgtcgaggcgcacggcgtactgcgcaatgccgtcaacgccgaagccaaccggcccttgagtaaagccggactcgaaggtagcgatgataccctgaccccattcggctttatccggcaaaccatcgcgataatcgcgtttgatataagcgttacgtaaaaagagatcgaggtggctgtcttcaataaagccctgactggtagattgttggctggcgaaagccggcgcggcggcaataatgccaagtgcgagtaatggtaattcttttttcactgagggcacttctctgtctgtcgatatattcaagggaatcactgccagtcagatattctcctgaaataatgtcgaaagcaatcattgtgtgagcagttattgcagccggaaacaggctgtatggcgcatgagccgtgcgccaggtagtaaggggtggactatttattattcggctaaagacgattctggaagccagatagtgtgcggcctttttaatttaccaaataatatatttctgaatcgccgggcataaaataattggctgtgatgcgctgtgataataattaacggtttgtgcgcttaaattatcaattgatgcggctaaatatttttacgggtatataaaaaagggaggcaataatgcctcccgctgccgcttatttaataccgtcggccttcatgcgatcgcgaatatgctgcgcgcgggcttccgatgccgggtgatcgtcaaacatggagctctgacggccggcttccaacttggccagtttttcgaagctggtggccagtcccgatggattgatgccgcgtttacgcagcaggtcgtaagagtagtcgtccgcttccgactcctggcgttgggagaactgcgagttcaccagtttttcgccgagatcgcccagctgcgactgcgacaggctaccgacgataccaccagcggaggccgccgccgcgcgcacggcgttggtgcccagcgcgacctgcatccctttcttcacgtggcccaacgcaacgtggcccatttcgtggccgataaccgcttctacttcgttatcgttcatcaggttcatcaggccgctgtaaacgcggatgcagccgttggccatcgcgaaggcgttgacgtcttttgtttcataaaccttgtagttgaccggctgaccgttgatgttatcgcccagcgccgcggcaatcttgctcaggcgtttgctgtactcgctgctggccggagaaatagtggctttggcgtccatctctttacacgcctggtcacttaaggtttttacctgttcgtcgctaagagagtaggcctggaatgcttccgcgcccgagctcagcagggcgttggagtccatgttctgacatccggttaacgttgctgcgatcccgaaggcaagaagggttgagcgaattttcatttttatcttccacaatcttatggttttttatctgaataatgggcgacgacggacccgcctcgtcctgtgcaaagtataaatagtatctcatgatccgggcgagcggattccgcggcagcacaacgtgttccagagatttcttaatgggcaaaaggatgctccatgtacatgctttgtcgcttgggttacattgttcacacttttttccggcgtagcccaaaacgcgctctcgtcaagtcgttaagggcatggccttataacatccgaactggagtcaaaatgtcctcacgtaaagagcttgccaacgctattcgtgcgctgagcatggacgctgtacagaaagccaaatccggccaccctggcgccccgatgggcatggctgacattgccgaagtcctgtggcgtgatttcctgaaccataacccgcagaacccgtcctgggccgatcgcgaccgcttcgtgctgtccaacggtcacggctccatgctgatttacagcctgctgcacctcaccggttatgatctgccgattgaagaactgaaaaacttccgtcagctgcactccaagactccgggccacccggaagtcggctacaccgcaggcgtggaaaccaccaccggcccgctgggccaggggatcgctaacgcagtcggtatggctatcgcggaaaaaacgctggcggcgcagtttaaccgtccaggacacgacatcgtcgatcacttcacctacgccttcatgggcgacggctgcatgatggaaggcatttctcacgaagtgtgctccctggccggtaccctgaaactgggtaaactggtggcgttctatgatgacaacggcatctccatcgatggtcacgttgaaggctggttcaccgacgataccgcgaaacgctttgaagcctacggctggcacgtggtgcgcgggcgttgacggtcacgacgctgacgccatcaaacgcgcggtagaagaagcgcgcgcggtcaccgacaaaccgtccctgctgatgtgcaaaaccatcatgggcttcggttcgccgaacaaagcaggcacccatgattcccacggcgcgccgctgggcgacgcggaaatcgcgctgacccgcgaagcgctgggctggaaatacggcccgtttgaaatcccgtctgacatctatgcgcagtgggatgcgaaagaagctggccaggcgaaagaagccgcgtggaacgacaagtttgccgcctacgccaaagccttcccgcaggaagcagccgaattcacccgccgtatgaaaggcgaaatgccgtctgacttcgacgcgaaagctaacgagttcatcgctaagctgcaggcgaatccggcgaagatcgccagccgtaaagcatcgcagaacgccatcgaagcgtttggcccgctgctgccggaattcctcggcggttctgccgacctggcgccgtccaacctgaccctgtggtccggctctaagccgatcaacgaagacaccgccggtaactacatccattacggcgtacgtgaattcggtatgaccgcgattgccaacggtatttcgctgcacggcggtttcctgccgtacacctctaccttcctgatgttcgtggaatatgcgcgtaacgcggtacgtatggcggcgctgatgaaacagcgtcaggtgatggtctacacccacgactccatcggtctgggcgaagatggcccgactcaccagccggtagagcaggtggcttccctgcgcgtcacgccgaacatgtccacctggcgtccgtgtgaccaggttgaatccgcgattgcgtggaaatatggcgtagagcgtcaggacggcccgaccgcgctgatcctctcccgtcagaacctggcgcagcaggagcgtaccgcagagcaactggcaaacgtggcccgcggcggttatgtgctgaaagattgcgccggccagccggaactgatcttcatcgccaccggttcagaagtggaactggcggttgccgcgtgggacaaactgaccgctgaaggcgtgaaggcgcgcgtggtctccatgccgtccaccgacgcgttcgacaagcaggatgcggcctatcgtgaatccgtactgccgaaagccgtttctgcccgcgtagcggtagaagccggtatcgcggactactggtttaaatacgttggcctgaacggcgccatcgttggcatgaccaccttcggtgagtctgcgccggcagagcagctgtttgaagagttcggcttcaccgttgacaacgttgtcgccaaagcgaaagcactgctgtaatcgctggtacggtgcgggctgatgcccgcacctcaaccctctcctgtgggagagggtgcgaacaccaaaaacggtaacccctgggttaccgttttgcttttatctcgccacctggctttttgtaggcgctattcctcgaacatgtaaccaccctgtgaattattccaaagaaaatgtgacgcaagtcatatagctggtttattgctctggacaaacattccttttattccgactttggcttattctagctgaagcgtttcagtcgtataaatgttcgacaattaatcaatcagtcgcagtttgcgacaggtaaggttcccctaaaggcgttgctggattactctgtcagccacctcaaatcagggataaccttgcaggagacctatgaccatacgcatcgcgattaatggcttcggtcgcataggacgcaacgtggttcgcgctttgtatgaatccgggcgtcgtgcggaaatcaccgtggtggcgatcaatgaactggcggatgccgcaggcatcgcgcatttattgaagtacgacaccagccatggccgtttttcctgggatgttcgccaggagcgggaacagctgtatgtcggcgatgacgtcattcgtctactgcatgagccttctatcgccgcgctgccctggcaggagctggcggtagatgtggtgctggactgtaccggcgtatacggtagccgtgaacatggcgaagcccatcttcaggctggcgcgaagaaagtgctcttttcacatcctggcggcaacgatctcgacgcaacggtagtcttcggcgtcaaccatgatgaactgcgcgcggagcaccgcattgtctccaacgcctcctgcactaccaactgcattattccggtcattaaactgctagatgatgcctacggcattgagtcaggaacggtcacgacaatccactccgcgatgcacgaccagcaggtgatcgatgcctatcacccggatctgcggcgcacccgtgcggccagccagtcaattattccggttgatactaaacttgcggcggggatcacccgtattttcccgcagtttaacgaccgttttgaggcgatcgcggtacgcgtaccgacgattaacgtcaccgcaatagacctgagcgtgacggtgaaaaaaccggtaaaggcctgtgaagtcaaccagttgctgcaaaaagcagcacagggagcatttcatggtatagttgactatacggaattaccgttggtctcgacagattttaaccacgacccgcacagcgccatcgtcgatggcacgcaaaccagggtcagtggcgcgcatctgatcaaaacgttggtctggtgcgataacgaatggggctttgctaaccggatgctcgacacgacgttagcgatggccgcgcaaggtttcaggtaaggcgctgcggcgcttgcaaaactttatcaagaatcaacgagaggattcaccatgtctgtaattaagatgaccgatttggatctggctggtaaacgcgttttcatccgtgctgatctgaacgtaccggttaaagatggcaaagtgaccagcgacgcgcgtatccgcgcctccctgccgaccatcgaactggcgctgaaacagggtgctaaagtaatggttacttctcacctgggtcgtccgaccgaaggcgagtacaacgaagaattctctctgttgccggttgttaattacctgaaagacaaactgtctaacccggttcgtctggttaaagattacctggatggcgttgacgttgctgccggtgaactggtggttctggaaaacgttcgcttcaacaaaggcgagaaaaaagacgacgaagaactgtctaagaaatacgctgcgctgtgcgacgtattcgtcatggacgctttcggtaccgcgcaccgcgcgcaggcttccacccacggtatcggtaaattcgccgatgtcgcttgtgcaggcccgctgctggccgctgaactcgacgcgctgggtaaagcgctgaaagagccggctcgtccgatggttgctatcgttggcggttctaaagtttccaccaaactgaccgttctcgactctctgtccaaaatcgctgaccagctgatcgtcggcggcggtatcgctaacaccttcgttgccgctcaaggccacaacgtcggtaaatccctgtacgaagcggacctggttgacgaagctaagcgcctgctgagcacttgcgatatcccggttccgactgacgttcgcgtcgctaccgagttctctgaaaccgccactgcgaccctgaaatccgttaacgacatcaaagatgacgagcagattctggacctcggcgacgtttccgcacagaaactggctgaaatcctgaaaaacgccaaaaccattctgtggaatggcccggttggcgtattcgaattcccgaacttccgtaaaggtactgaaatcgtcgctaatgctatcgcagacagcgaaggcttctctatcgcaggcggcggtgacaccctggcggcgatcgacctgttcggcatcgctgacaaaatctcctacatctccactggcggcggcgcattcctcgaattcgtggaaggcaaagttctgccggcagtagcaatgctcgaagagcgcgctaagcagtaatttagttcaggcggggaaacccgcctgtttttcagcgcgctaacgtacaattttgtacagctcgcgaaccttcttcaacggtcgaagatacagatacaggactaagtaacatgtctaaaatttttgatttcgtaaaaccgggcgtcatcactggcgacgacgttcagaaagtgttccaggtagctaaagaaaacaactttgctctgccagcggtaaactgcgtgggtactgattccatcaacgccgttctggaagctgctgcgaaagttcgttctccggttatcgtacagttctctaacggcggcgctgcgttcatcgcgggcaaaggcgtgaaaactgacgttccgcagggcgctgctatcctcggcgctatctctggtgcgcatcacgttcaccagatggctgaacactacggcgtgccggttattctgcacactgaccactgcgcgaagaaactgctgccgtggatcgacggtctgctggacgcgggtgaaaaacacttcgctgccaccggcaaaccgctgttctcttcccacatgatcgacctgtccgaagagtccctgcacgaaaacatcgagatctgctctaagtacctggctcgcatggccaaaatgggcatgactctggaaatcgaactgggctgcaccggcggtgaagaagacggcgtggacaacagccacatggacgcttccgcactgtacacccagccggaagacgttgattacgcgtacaccgagctgagcaaaatcagcccgcgcttcaccatcgccgcttccttcggtaacgtacacggcgtttacaagccgggtaacgtggttctgaccccgactatcctgcgcgactctcaggaatatgtttctaagaaacacaacctgccgcacaacagcctgaacttcgtcttccacggcggttccggttcttccgctcaggaaatcaaagactccgtcagctacggcgttgtgaaaatgaacatcgataccgatacccaatgggcgacctgggacggtatcctgcagtactacaaagcgaacgaagcttacctgcagggccagctgggcaacccgaaaggcgaagaccagccgaacaagaaatactacgacccgcgcgtatggctgcgtgccgctcagacctctatggtgacccgtctggagcaggcattcaaagagctgaacgcgatcgacgttctgtaatttagcttgctgcgagcgtaatgaaggaaacggcgttttcttttattaccggcataaaaatggcttcctgcgggaagccattttttttagcggcttacacaggtccctttctccccggctaatatctgtggcgcatcctttaacgcgccgataaaggcgttatttccggtctgtttgacaaactgaatgaccgcttccgctttcggccccattgcgccgtccggcgcggcaaatggcgcgagcgttgcaatggtggcgtgatgcaacgggcgagcctgcggcgtcccccagtcaacatagaccgcatcggcatccgtcagtatcagcaggtggtcggcatgaatggcgctggcaagcgccgccgccgtcagatctttatcgataaccgcttcgactccccggtaaccgtgcgtatcggcaaccaccgggatcccgcctccgccgcagcaaatcaccagatgaccggcatccatcagcgtctgaatggccgcgctatcaacaatatttagcggtctgggggaagggaccacccgacggatatagtcgccatccgctttcatctgccaaccatagcgtttttccagttccgcctgctgctgcggctgataaaccgggccaatatatttccccggcgccgcgaaagcgtcatcatttgccgccacctctacgcgcgtcatcagggtgctgaccggcgcaccggcgtactgcatcagttcctgagcgatagcgaagcctatcatcccctgactttccgcgaccagaatatccagcggccaggcgggagattcctgataggcggcgttttgcagcgccagcaatccgacctgcgggccattgccgtgtacgatcaccagttggtaatcgcgggctaattccgccgccatccgggcaaaaagttgaatgctgcgctgttggttttccgcgctgagcacttctccgcgctgcagcagtgcgttaccacccagcgcaatgacgattttctttttcatgatgacctcattgaattatagaagtgcgctaaaaatatcgttttagcggccaggtaatgtgatgagatcgccactttatcgagagtaaaaaatatctcgctaataaatattatattcgctggttttatttaaatgtttttaaagatgattattagattttttttaataatttcgtcagcagtctttaggaatttaaaacaatggattttgtgtgactttgttcaaatgaaatacatggttaccccgatatggttagcagagttaaaacatcaatccttcacccatccgctgggatggcctgaggtgaatattgccgggagatagcttatgtcaggaacgtatgaggtaaccgaggtgaccaaaagaaaaggaatacccgcctggtgggtcacggtatttcttttctggttaggttgggtatttatgtatgccgatcgcacggtattaaatccggtgatgggtgaactggaaaaagaatttggtttaagcggtacgcaattaggagtgctcaactccgtattttatttttcttatgcattgctgcaggtgccggcggggatcctcggggacaaaatcggtaagaaaaaagtgctggtgcctgggtttattctatttggcgtttttaccgcggtcaccggttgggtaaaaagctggtatatgctgctgtttgcccgcgtggtcaccggcgcaggcgaggggacatattatggcccgcagtacggattgtcttccgagcagatcccgaaaaagttccgctcgctgggtagcgcgattatcaatagcggaatggcctttggcatcgcgttgggtctgatgacctccagctggctggtctatgaccagggttactcctggcggatgccgttttatgccatggcgataccttcggtgctggtaggggttgctatctggctctttgtgaaagagaaaaaacgcaccgccgacgccgagggcaagccggtacaaaaaggcaaatttagcgatctgttgaagaatcgtaatttaattctgacctatatcatggtgttctgcagcctgtttggtttcttcgttattctgacctggcttccttattatctgcaaaacgagcgcggtattgccggtagcgaaactgggtttatttcgtcgctggtcgcgtggatctctattcccggcgcgctgttgttctcggggctgtcggataaattaggccgccgcaaaccgttaattttattcctcgtgccggtggcgattgccagcatgctttccattatttggatgccgagtatgaccggcgtcatcgtggcgctgtgcgtgtacggcctggttggcaaactggcgctggatccggtgctggtggcgctggtcgccgatagcgtcgatgagaccaattacagtaccgcgtttggtttatttaattttattgggatgagctcatcgattctggcgccaattattgcaggggcggcgcgtgatattaccggcagtctggcttcgagtttttatgtttccgcggcgctgctggtcattggtctggtcgccatgctgtttttaaaagaaaaacgcacataaagaggtagcggtaatgatttacgcttttattaaaaagggaagctttcaggattccgtaagcctgatgattatctcccgaaaattaagtgaacgcccggaagtggatcaggtttcggtcatgatgggtaccccggcgaataaatcgatgctggagtcgaccggattctggcacccggatttcgccgaggcgacgcccaacgatatttgtgtcgcagtccgcacgcaggaagcgcagccggaaattctcgatttaatccgtgaacaattagagaaagagctgagcgctatcgctaatgcatcgggcagttcaacgcagctggtcaaggcgcggcgctgggagagcgcctgccagaaattaccggacgcgaatctgttgctggtttcggtggcaggcgagtacgccgccggggtggcgaaagagggattgttagccaataagagcgtgatgctgttttccgataacgtcccgctggagcaagaagttgaactgaaaacgctggctcgcgagaaggggctcattgtaatggggccggactgcgggacggcgatgatcgctggtagtccactggctttcgctaacgttttgccgcagggcggaattggcgtcatcggcgcatcggggaccggcatccaggaaatcacctcgcaggtggcgctgcatcaacagggaattagccacgccatcggccttggcgggcgcgatctcagcgccgaagtcggcggtatcagcgccctgaccgcgctggagatgctggcggccgatagcgcgacgcaggttatcgcttttgtctctaaaccgccttcgccccaggtgcgtgcccgcatcattgccgccatgcaaaaacagaataaaccggtggtggcgctgttcctcggcagccgtgccgagcagcgccgcgagggcaacgtctggctggcgaactcgctggcggacgccgcgcaactggcggtactgctgatgcgggtcgcgcaacagcggcagagccagccgcaggttgcaggcaaggggatttatggcttgtacgctggcggtacccttgccgccgaggccgcgatgctgctttccgcccatctgggagtgccggtcagcgacagccacgccgacggtgtgatgctggaagccggcgggcatcgcattgtcgaccttggcgacgatagctacaccctcggcagaccgcacccgatgatcgaccccaccacccgcagcattgaaattgagaagctggcggcgatgccggaagttggcgtgctgttgctggatgtggtgctgggctatggcgcctgcgccgatcccgccggggcagtggttgaggccatcgagcaggttcgccgtaaacgtgtcgcgccgttggtagttatcgccaccatgaccggtaccgatgccgacccgcagggccgtagcgagcagatagccatcctgggcaatgccggggtcgcggtggtcgaaaccctcgaagaggcgacgctactggcggttagcctgacgcagcatcagccgcagagcgaatcgacagcgcataacccgctgctcgacggcgtgcaggtcattaatgccgggttgcgcagcttcgcgctggatctacaaagcagcggtacgccggtagtgcattatcagtgggcgcccgttgccggcggtaacgctcgtcttgccagtttactcaagcagttacattaagttcagaggtatggatatgtactcatcaattgcacaggctaacgaagccattatcgaacgaattaaagccgcgcgcccgcattgggttgccgtccgccctgcgaaagaggcggtggctgaattatcttctggacgtaaattactgcacgccgggccgccaatcgcctggcaagagatgaccgggccgatgcgcggagcctgtatcggcgcttcgttgtttgaaggctgggcgacgagcgaagaagaagccgtgcggatgctggagcagggagaggtggaattcatcccttgtcaccacgtgggcgcggtggggccgatgggggggatcacctcggcgaacatgccggtgctggtggtgcgagatgtggttcatggtaaccaatcctgctgcaacctgaatgaagggatcggcaaagtgatgcgcttcggcgcctacggcgaggatgtgcaaacgcgtctgcgctggatgcgcgacacgctcgcgccggtgctgcaagaagcgctgtcgcgaatggaaaacggcgttgacctgacggcgatgatggcgcaggcgattaccatgggcgatgagttccaccagcgtaatatcgccgcctcgtcgctgctgctgcgcacgctgtcgccggtcattgccggcctggagcggccaaaggcggaaattgtcgccgtgctgcagttcctcagcgtcaccgatcagttcttcctcaacctggcgatggcttacagcaaagcggtgatggatgcggcggcggaaattaaagccggctcggtggtgaccgccatgacccgcaatggccgcgagttcggcattcgcgttagcggtaccggcgatcgctggtttaccgcaccggtgaatacgccgcaggggctgttcttcaccggctacagccaggcggatgctaacccggatatcggcgatagcgcgattaccgaaacgctggggatcggcggcgcggcgatgattgccgccccgggcgtgacgcggttcgtcggcgctggcggaatgggcgcggcgctggaaacatcggaagagatgtctgaaatctatcttgccaacaacccgctgttccagatcccatcatgggaattcaaaggcgcctgtctggggctggatgttcgtcgggtcgtagaaaccggcatcacgccgcttatcaataccggtattgcacaccgcgaagcagggataggtcaggtgggggcgggaaccgttcgcgcgccgctgctgtgctttgaaaaggcgctggaagcgttagcggaactgcaccacatcactgcctgagtcgagaaaggggcggcgctgccgccccggagagacgtcgatgaaaaccctcaatgcgctggcctgtaccggccttgaacagctagccgatggcgtgtggcagcgtcatagccggttttcacaggcggttaatttcgtccacgccgatgggactttgctgacgttgtttcgctacggcaaaggtatgggtccgacggggattctgcttagcagcacccagtttgcgcagttggctaatcttccgcggctggttaagcaagggcgcttgttatggggggcgggagtcgccattcgcccgcgtcggacgctcacacttcgctttccggtcggccactcgtttcctctcgatctttcggcttattcacgtcagagcggacttcgcgtcgcgctcaatcaaccgttagcggatatgccgttttattcatctattatgggtgagcttgagcgctggcggcgcggcgatctcccggactggggatggctgattggcaacgggcccggattaactcccagcggcgatgatatgctcgccgggatgttggcgatgctgttcggcgccggtttttctgaccgcctgcacgcgtttatccccccggcggatcaacttacctcgctgacaacttcggtaagctgtagctatctgaatagcgccaggcgcggcgagttttcgctgccggtggttaaggtaatgcgcgggctgcggtcgacaggcgatcctaagtgggcaattcagcgtttgctggcggtaggtcatacttctggggctgatacgctgctggggatggcattcgcgcagcactggttacagagagtggattcaaggagaacgcatgctcgatcaggaaaccatccgcacgtttatacaggtcgccgagaccgggagtttctcccgtgcggccagcctgctgcacaaaacgccggcggcgattagctatcgtatcaaaacgctggaggagcaggtggcaacgcagctcttcttacgcacgacccgatcggtaagcctgacgctggccgggcaacatctgcttgagcactgtcggcagtggctgaactggctcgacgtgatgcccgatgaactccagcagattaatgctggcgtcgaaagacaggttaatatcgttatcaataatcttctgtatcagccgcaaagcgccgcggatcttctgacctggctacatcagcagtttccctttacccgctttcagctttcccgccaggtctatatgggggtctgggactctttgctatacgacgatttccagctggcgattggcgtcaccggctcggaatccctgtccaacaatatctctttattgccgctcggcgatattcgctggcagtttgtggtggcgcagaatcatccccttgccactcatcccgcggcggtgctctccgacgatgcgctacgccgctatccggcaattaatattgaagatacatcgcggactctgacgcgtcgtgttgcctggctgctcaatgggcaaaaagagatcaaggtgccggatctcagcaccaagctggcctgccatcttagcggtctgggggtcggctttttgccggagcggatgtgtcgcgcttacctggagtccggcgcgctggtggcccgtgcggtcgccaacccccgccagccttcgccgctctccgttgcctggaagaatgccggcagcggtaaagtcgtcagtgaaatcgccagggcgttcgagcgcaaagaggcattagtcagcggttttttgcggatggtggatcgtcctgcgcaagcgtaatgcggcgttagtttcatctggatcagattgagaaatggcatcttcggtggtttttgtttacctttaaaaggtcattttcgtgagaatgatctcatttgcttttttttgatatgacccaaggattactaaatggaagatttgaacgttgtcgatagcatcaaccatgccgggacctggctggcgcgcaaccaggagttgctgctgagctatgccgtcaacatcgttgccgctatcgttatcctgatcatcgggatgatcgtggcgcgcatcgtttctaacaccgtcaaccgcctgatgctggcgcgtaagatcgacgcaactgtcgccgattttctctccgcgctggtgcgctatgcgattatcgcctttacgctgattgccgccctgggccgcgttggcgtacagaccgcctcagtgattgccgtgctgggcgccgccggtttggcggtgggtctggcgctgcaggggtcattgtcgaaccttgccgcaggcgtactgctggtgatgttccgcccgttccgcgccggtgaatatgtcgatctcggcggcatcgcgggcaccgtgcagaacgtgcagattttctccactaccctgcgtaccgtcgatggcaaaatcgtggtggtgccgaacggcaaaatcatcgctggcaatatcattaacttctcccgtgagccggcgcgtcgcaatgagtttattatcggcgtctcctacgatgccgatatcgataaggtgaaacaactgctgaccgcgattattgaatccgacgaccgcattctgcgcgatcgcgaaatgaccgttcgccttaacgaactgggcgcctcttcggtaaacttcgtggttcgcgtatggagcaaaagcagcgacctgcaaaacgtctactgggacgtgctggagcgcattaagcgcgatttcgacgccaacggcatcagcttcccgtatccgcagatggacgtacacatggtgaatcagcaggaaaaagcgcagtaattttttccagcaatggtgcaagaccggcactgccggtctttttttgtctttgtatattagctttgcttattaatgattaaaattatcaatttccgctaatgttgacggcgcgctatattctccggcattaacgatgaaaccggaaaataaaacgatgctatcttattactttcaagggattgcgctgggcgcggcgatgatcctgccgctcgggccgcaaaacgctttcgtgatgaatcaggggatccgccgccagtatcatttaatgattgcgctgttgtgcgcgcttagcgatctggcgttgatctgcgccggtattttcggcggtagcgcactgctgatgcagtcgccgtggctgctggcgctggtcacctggggcggcgtcgccttcttgttatggtatggcttcggcgcgctgaagacggcgatgagcaataatctcgagctggcctgcgccgaggtgatgaaacaggggcgctggaaaatcatcgtcaccatgctggcggtgacctggcttaatcctcatgtttatctcgatacctttgtggtgctcggaagcctcggcggacagctggcggtcgagcccaaacgctggttcgcgctggggacgattagcgcgtcattcttatggttcttcggcctggcgctgctggccgcgtggctggcgccgcgtttacgtaccgcgcgggcgcagcgaatcatcaacgtgcttgtcgggctggtgatgtggtttatcgccctgcagttggcaaaagatggcctgcaacatatacagatgctcatcaaccaggcttagtccgatggactttccgcgcgtaagcgctaagctagctggcatgcgtccttaaaatgggcgacctaagcaagatggagaaacgacagtgaagttaaaagtcttagccctggcggcagcactcggattcagcactatggcggcgcaggcaagtgaattgccggatggcccgcacattgtgacttcaggcacagcaagcgttgcagcggttccggatatcgccactctggcgattgaagttaacgtcgcggcaaaagatgcggcatcggcaaaaaaacaggctgacgatcgcgttgcgcaatatctctctttcctcgaaaagagcggcattgccaaaaaggatatcagctcggcgaacctgcgtacccaacctgattacgactatcagaacggcaaaagcatcctcaaaggctatcgcgcggtgcgtaccgttgaagttaccctgcgtcagctcgataagctgaatggcctgctggacggcgcgctgaaagcggggctgaacgaaattcgttccgtatcgctgggcgttgcgcaacctgatgcctataaagataaagcgcgtaaagcggctatcgatgatgcggtacatcaggcgcaggaactggctgctggcttccacagcaagctgggtccggtctatagcgtgcgttaccatgtttccaactatcagccgagcccaatggttcgcatgatgaaggcagctgacgccgcgccggtctccgcgcaggaaacctacgagcaggcgaccatccagtttgatgatcaggttgacgtggtctttgaactgcagccagcacaggccgccgcgcctgccgcgccggcgaaaccagctgaagcgccgaaaccggctcagtaagccgcagcgacaaaaaagccacttcagtgaagtggctttttttatgcccgccgtttaatcctggcgcaacaccttgtggccgtaatcaataagcgcatcggtcacccggcgcatcatgcggctttccggcgcaaagcggtgccagtagagcatccggcgctggaacagccccggcgtcaggtcgataagctcgccgctcttcagctctttctcgatctgcaggtgcgggatcatacagcaggtggtgccctggcgcgccagctgcacgaaggcctccgacgagttgacgatatggcagggcacgctgcccggcggcaggtcgaagttttgctgcaggaacgcctggtgcatatcgtcgagatgatcgaaggcgaccaccggcgctttcagcagcgcagaacgcgttaccccgttagggaaatagcgttgcgcaaattcctttgaggcgacgaacaggtaatcgagcgcgccgagttgatcgaccaggcagcttggcagcgcctgcggctgaatactcaccgcgccgaccacttccccacggcgcaagcgctcctgggtacgggtttcatcttcaacctgcagattgaggcggataggggagtcggataacacgttggccagcgccggcagcaaccaggtcgccagactgtcggcgttgaccgccaacgacagcagcagcggcgtggagccggtctgctcatcgcccagccactcttcttccagcagctcaacctggcgcagcagagccaacagtttttgcccctgctcggtcgggcgcggcggcacggtacgcaccagcagcggttggccaaacatgttttccagctgtttgatacgctgtgagacggcggactgtgtaatgcatagcttctgcgcggcgcgctcaaacccacgttccctaatcaccgcatccagcgcttgtaatgttctgtagtccggtcgtttcattattctggcgtacccccataacttttcgttaacccgcactatgacataaatttgtttttgataaagacgaaaatggtctgctcagatgtgtgatcgccatcgcagggacatttcatccgccgatgttctataatgcgcggtaagtattcacatctcggacgataatcatgacgcaggatgaactgaaaaaagcagtcggctgggcagcgctgcaatatgtacaaccgggcaccattgtgggtgtcggcaccggctccacggcggcgcattttattgatgcgctggggaccatgaaagggcagatcgaaggcgcggtctccagctccgacgcctctaccgaaaagctgaaaagcctcggtatcccggtattcgaccttaactccgtcgaccgcctgggcatctacgttgacggcgcggatgaaattaacggccacatgcagatgatcaaaggcggcggcgcggcgctgacccgcgaaaagatcatcgcctcggttgccgataagtttatctgcatagccgacgcctctaagcaggttgatatcctcggcaacttcccgctgccggtggaagtgatcccgatggcgcgcagcgccgtcgcgcgtcagctggtgaagctgggcggccgcccggaatatcgtcagggcgtggtgacggataacggcaacgtgatcctcgatgtacatggcctggaaattcttgacgctatcgcgctggaaaacgccattaacggtattccgggcgtggtgaccgtcgggttgttcgccaaccgcggcgccgacgtggcgctgatcggtaccgccgacggcgtgaagaccatcgtcaacaaataagacgatcggggggaagtttcgcgcttccccctaaatttttttctatggccttaatttggtgacttgtgtcacatttacgtaacctttctgagtaacaatctgccatctattctctttctggtgttttgtcctgtcttttgcttcaacgtgatatttcttcaggtcggcgaggcaaacgttcatattgccgcgatagttttttttgatatgttgctggaagagtttttgttcagcacgacatcagtaccaataaaaacaggacggggaaatggcaaaggtatcactggaaaaagacaagattaaatttctgctcgttgaaggcgtgcatcagaaagcaatcgataaccttcgtgcggcaggttacaccaacatcgaatttcacaaaggcgcgctcgatactgaagagctgaaagcgtcgatccgtgatgcccattttatcggcctgcgttcccgtactcatctgactgaagagatcttcgccgcggcggaaaaactggtggcggtgggctgcttctgtatcggcaccaatcaggtcgatctggatgcggcggcaaagcgcggtatcccggtatttaacgccccgttctcgaacacccgttcggtggctgagctggtcatcggcgagctgctgctgatgctgcgcggcgtgccggaagctaacgccaaggcgcatcgcggcgtgtggaataagcaggcggtaggcagctttgaagcgcgcggcaaaaaactggggattatcggttacggccatatcggcacccagctcggcattctggcggaatcactggggatgcacgtctatttttatgatatcgaaaacaaactgccgctgggcaacgccacgcaggttcagcatctctccgacctgctgaacatgagcgatgtcgttagcctgcacgtgccggaaaacgcctccaccaaaaacatgatggggccggaagagctggcgctgatgaaaccgggcgcgctgctgatcaacgcctctcgcggcacggtggtcgatatcccggcgctgtgcgatgcgctgtcgcgtaaacacctggccggcgcggccatcgacgtcttcccgacggagccggcgaccaacagcgatccgtttaactctccgctatgtgaattcgataacgtgattctgacgccgcatatcggcggttcaactcaggaagcgcaggaaaacattggtctggaagtggcaggcaagctggcgaagtattccgataacggttctacgctgtcggcggtgaacttcccggaggtttctctgccgctgcacggcggacgccgtctgctgcatattcatgaaaaccgcccgggcatcctgacggcgcttaaccagattttcgccgcgcagaacatcaacatcgccgcccagtatctgcaaacgactccgcagatgggctatgtggtaattgatatcgaagccgatggcgacgtcgcgcagcaggcgctgctggcgatgaaagcgatcccgggcaccatccgcgcccgtctgctgtactaatttgttgttgcctcacgggcaggtcgcatacctgcccgtattttttaatgtcttcctggcgcaattctcgaactcgcacaacactctaccagcgccaggttttacctggcgtaatcaccgccggcagcggtatatcccactgttcgctcggcagcgtatccacctgctggcagtcgtgggcgtagcctaccggctgcaggcgatactgccgccagttctgtaaagtccgatcatagaaaccgccgcccatccccaggcgttgaccgctggcatcgaaggcgaccagtggggtaatcagcacatcgagttcggcaagcggcaggacgtcgcgcacgtcgagctttggttcgtaaatcttcaggcgattgaaaatcagctggctttgcggatggtaatgcaaaaacagcagattgccggggctaaacggatgcagtaccggcagataaacccgcttgcccgcccgccacaattgctcgatcagcggttgggtgtccagctcgccgtcgaaggagaggtacagcgccacggtatgagcgagaacgacgggcggatacgccatcattcgttcagcggcctgcagggcgaagcgctgctgctgttcggcgctaagcgcgcgtctacgctcgcggatctgctggcgaatttgctgtctggagagcgggatatcgggctgtatagtcatgctggtctcattacgagcaggcgaaacgatacgggaaagtgtaatacagggcggcacaggccgaaaacaacgttgaggggataatgcgaacttaagaagggaatctccgagatgccgccgcaggctgtaacccttgaacccttggttcaaggtgaatgcgtcgtcacagttttaaggcttctcgggcgaaccgagcatgctcaccaaccgtggagcgccacattcttgtggtatgaaatatcggctcaggggactggcccgcttgcaaacatctcagagaaattttgttcttgcgattactctaacacagttaacgacaaagtgttattcaaacttcgaccccggtctttcgcttatgcgaccttgctcaagcaatgcctgttcgatggtctgctgaagcatgcgaatgcgctgttccatactggaggcgtagtcgcgggtcttcgctttttcctgagtcaactcatagctgatgttcaacgcggcgatgaagaccagctgctcagtatttgtgactctagtgcgttcttttaaatcttgcaaccgctgattaaggtcttcagctgcctgattcagggcatccctttgttcaggcgggcaattcactcgcagtgaacggccaaaaatttggagatctacgggttgtgcagacatgccaccttcctgctgattgactgcgctgccttcacgtccgagcccggctctgcgaaggggcgacactatagctaccctggtgcggggatacaagcccttttctggttcaccagggtccaaagtggtagcatatcatgaatattcctcccaacgatgacgaatgcgcatgtctatacagaacgaaatgcctggttacaacgatgtagaccagttactgaaccaacaaggggtgggattaaccccggccgaaatgcacggtttgataagcggcatcctttgcggcggcaacaccgacagcagctggcagccgctggtgcatgacctgaccaacgaaggccttgcctttggtcatgaactggcccaggcgctgcgtagcatgcattccgccaccagcgactcgctggaagatgatggtttcctgttccagctgtatatgccggaaggcgacaacgtcagcgttttcgaccgcgccgacgcgctggcgggttgggtaaaccatttcctgctcggccttggcgtgacccagccgaagctggataaagtgaaggatgagaccggcgaagccatcgatgatctgcgtaacattgcgcaactcggctacgacgaagatgaagaccaggaagagctggaaatgtctctcgaagagattattgagtacgtacgcgtcgccgcgttactgtgccacgataccttcgcgcgccagcagccaaccgcaccggaagtacgcaagccaacgttacactaaataaaaacgacattcagggggcgtcatgacacagcaggagtttctttctcgtcgccaggcattattggcgcagatgcagccgggcagcgcggcgctgatttttgccgcgccggaagcggtacgcagcgcagattcggaatatccctaccggcagaacagcgatttttggtacttcaccggcttcaacgaaccggaagcgctgctggtgctgatcaaaagcgatgaaacgcacaatcatagcgtgctgtttaaccgcgttcgcgatctgacggcggaaatctggtttggccgccgtctgggccaggatgccgcgccgggtaaactcggcgtcgatcgcgcgctggcgtttagcgaaatcaaccagcagctgtatcaactgctcaacggcctggacgctatctattttgcccagggcgaatatgcctatgccgatgaaattgtgtttaacgccctcgaaaaactgcgtaaaggttcacgtcagaacctgcaggcgccgaactccgtcatcgactggcggcctgtggtgcatgaaatgcgcctgtttaaatccgcggaagagctggaagtgatgcgccgcgccggtgaaatttccgcccttgcccatacccgggcgatggaaaaatgccgcccgggcatgttcgaatatcagctggaaggcgaaattctccacgaattcaaccgccatggcgcgcgtttcccgtcttataacaccatcgttggcggcggcgaaaacgcctgcatcctgcactacaccgaaaacgaatccgaactgcgtgatggcgatttagtgctgattgacgccggctgtgaataccgcggctatgcgggcgatatcacccgcaccttcccggttaacggtaaattcactaaaccgcagcgtgaaatctacgacatcgtgctggaatcgctggaaaccgcgctggagctgtatcgtccgggtacctccatttatgaggttaatcaggaagtggtgcgcattatgattaccggcctggtgcggctggggatcctgaaaggcgagattgacgagcttatcgccaacaacgcccaccgtccttacttcatgcatggcctgagccactggttgggtctggatgtgcacgatgtcggtaattacgacaccgaccgttcgcgcgtgctggaaccgggaatggtgttgaccgtcgagccggggctgtatatcgccaccgacgccgacgtaccggcgcaatatcgcggcatcggtattcgtattgaagatgacatcgtgattatcgaagatggcaacgaaaatctcaccgccagcgtggtgaagaaggcggatgagatcgaggcgctgatggcggcggcgcgccagtcatgagcgtgctgattgtcggcggcgggatgactggcgcgacgctcgcgctggccatctcccgtatgaccggcggcgcgctgccggttcatctgattgaagcgcaggatccggcgtcgtcacgccacccaggttttgacgatcgggcgatcgccctcgctgcgggcacctgccagcagctggcgcgcatcggtatctggcagaaccttgctaaacgagcgacgcctatccagcgggtacacgtcagcgaccgcggccatgccggttttgtaaacctggcggcggccgattacggcctgtcggcgctggggcaggtggttgaactccacgatgtcggccagcggctgtttagcctgctgcgcgaggcgccgggcgtcaccctgcactgtccggcgaaagtggaagcggtcaaccgcagccaggacagcgtcagcctcaccctcgatagcggcgaaacgatcaacggtaagctgctggtggcggcagatggttcgcgttcgtcgctgggcgcccgctgcggcattagctggcagcagcagccctatgagcaactggcgattatcgccaacgttagcaccgcgttgccgcacgaaggccgcgccttcgagcgctttaccgagcacggtccgctggcgatgctgccgatgtcgcaagggcgctgttcgctggtgtggtgccatccgcagtcgcggcgcgacgaggtgctgagctggtctgacgaacgtttttgccaacaattacagcaggcgttcggctggcggcttgggcgcattacccatgccggtaagcgtagtgtttatccgctggcgttaaccaccgccatccgttcggtgtcgcaccgtctggcgctggtcggcaacgcggcgcagacattgcacccgatcgccgggcagggctttaatctcggtctgcgcgacgtgatgagcctggctgaactgcttgccgacgcccacgggctcggcgaggatgtgggcaattattctctgctatgccgctaccaggcgcggcgagcggatgataaagccgccaccatcggcgtgaccgatgggctggtgcatctctttgccaaccgttgggcgccgctggtggcggggcgcaacgtcggtctgatggcgatggaattatttaccccggcgcgcgatgcgctggcgcagcgtaccctcggttgggttccccgttaaggagtagaacgtgcaaagtgttgatgttgccattgttggcggcggaatggtgggactggcggtagcctgtggtttacagggcagtggcctgcgcgtcgcggtgttggaacaagcggcgccgcagcctcttgacgccgatgcgccgccggcgctgcgcgtttcggctattaatgccgccagcgaaaagttactggataagctgggcgtctggagcgaaatcatcgcccagcgcgccagctgctatcacggcatggaagtgtgggacaaagatagctttggccgcattagcttcgatgaccagagcatgggctttagccatctgggccatattattgaaaatgccgtggtgcatcacgcgctgtggcagaaggcgcagcgctgtgctgacgttaccctgctggcgcctgcgcaactgcagcaggtagcgtggggcgaaaacgaagcttttctgagcctgcaggacggtagcatgctgaccgcgcggctggtggtcggcgccgatggcgccaattcgtggctgcgtaataaagccgatattccgctgaccttctgggactatcgccatcatgcgctggtggcgacgatacgaaccaccgagccgcatcaggccgtggcgcgtcaggcgttccacggtgaaggcattctggccttcctgccgcttagcgatccgcatctgtgctcgatcgtctggtcgctgtcgccggaggaggcgcagcgaatgcagcaggccgatgcagccgcgtttaaccaggcgctgaatatcgcttttgataatcgccttggcctttgccagcttgagagcgatcggcaggttttcccgctgaccggacgctacgcgcgtcagttcgccgcccatcgtctggcgctggttggcgatgccgcccacactattcatccgctggccgggcagggggtgaaccttggctttatggacgccgccgagcttatcgacgagctgaagcgcctgcatgcgcagggtaaagatatcggtcagcatttgtacctgcgccgctatgagcgcagccgcaagcacagtgccgcgctgatgctggcgggtatgcaggggttccgcgaaatgttttccggcagccatccggcgaagaaactcctccgcgatatggggctcaaactggccgattcgctgcctggcgtaaaaccacagttgattcgccaggccatgggcctcaacgatctccccgcctggttacgttaaccccgtcacacttcttttacccggcctgcgtgccgggttttctctctcatttgaaatattctaatttcacctcttttttcgcattagttttattaatgcgctcttttttttgttaaagaaattaggcccataaaatcgcataaaacaccatcatcacctgactggtttgctcattatgttaattttatgtggcacaaatcgcttttttccagtcaataactctgtaggcttttctgcgcgctttggtcataagctaatgtgatgtcctgatttaccttatggtttagcaccgggttcggtggtaagttcaggcaaaagagaacgtttgcgtcggtgtccgtaagcggtgccgtcgccggatttcgtggcgcaaaatcgccgacaatatcgtggctggttccgttttattcgatgaggaaaagatggctcaacagactccgttgtatgaacaacacacgctgtgcggcgctcgcatggtggatttccatggctggatgatgccgctgcattacgggtcccagattgatgagcaccacgcggtacgcggcgatgcagggatgttcgatgtgtcgcatatgaccatcgtcgatttccacggcagccggatcagagagttcttgcgctatttgctggcaaacgatgtggcgaagcttaccaccccaggcaaagcgctctacaccggcatgctaaccgcttccgccggcgtcatcgatgacctgattgtttatttcctttctgaagattatttccgcctcgttgttaactccgccactcgtgaaaaagacctcgcctggatttccgaacaagccgaaccttacggtcttgaaattaccgttcgcgacgatctgtcgctgatcgcggtgcagggtccgcaggcgaaagcgaaggcggcgacgctgttcaccgacgctcagcgccaggccgtggaaggcatgaagccgttcttcggcgtacaggccggcgacctgtttatcgccaccaccggttataccggcgaagcgggttatgaaatcgctatgccgaacgagcaggcggcggatttctggcgcggtctgctggacgccggcgttaagccttgcggtcttggcgcgcgcgataccctgcgcctggaagccgggatgaatctgtacggccaggagatggacgaaggcgtctcgccgctggcggcgaacatgggctggactatcgcctgggagcccgccgatcgtaacttcatcggccgcgaagcgctggaaatgcagcgcgaaaaaggcaccgagcagttggttggcctggtgatgaccgagaaaggcgtcctgcgcggcggcctgccggtacgttttaccgatagcgacggtaatcaaaaagaaggcattatcaccagcggcaccttctcgccgacgctgggctacagcatcgcgctggctcgcgtaccggccgggattggcgacaccgcggtggtgcaaattcgtaaccgtgaaatgccggtaaaagtgactaaacctggttttgtacgcaatggcaaagccattgtgtgatttcccttttttggagatgaattgatgagcaacgtaccagcagaactgaaatacagcaaagaacacgagtggctgcgtaaagaagcggacggcacctataccgtcgggatcaccgagcacgcgcaggagctgcttggcgacatggttttcgttgacctgccggaagtgggcgccaccgttgaagcgggcgccgattgcgccgttgccgaatccgtgaaagcggcttccgatatctacgcgccgattagcggtgaaatcgttgccgtcaacgaagagctgaacgactctccggaactggtcaacagcgacccgtatgccgacggctggatcttcaaaatcaaagccagcgacgaagcgcaggttgccgcgctgctggatgccgccgcctatgaagctctgttagaagacgaataaatgtgtgccggatggcgctgcgcttatccggcctacgaactttgtaggcccggtaagcgctagcgccaccgggcaattcaggtaagtagagacaatcacgattcaccgcacgtttcaggaaccatcgctcatgactcagactttaagtcagcttgaaaaccgcgacgcctttattgaacgtcacattggctcggacgctcagcagcagcaagagatgctgaagaccgtcggcgcggattcgcttaacgccctgatcggccagattgtgccgcaggatatccagctggcgaccccaccacaggtgggcgacgcgactaccgaattcgccgcgctggcggagctgaaggcgatcgccggtcgcaacaagcgcttcaagtcttacatcggcatgggctacaccgccgtgcaactgccgccggtcattcagcgcaacatgctggaaaacccgggctggtacaccgcctacaccccttaccaaccggaagtatcccagggccgtctggaatcgctgctcaacttccagcaggtcactctggatctgaccgggttggatatcgcttccgcttcgctgcttgatgaagccaccgccgccgccgaagcgatggcgatggccaaacgcgtgagcaaactgaagaacgccaaccgcttcttcgttgccgccgacgttcatccacaaaccctggatgtggttcgcacccgtgcggaaacctttggcttcgacgtgattgtcgatgacgccgacaaagtgctcgatcaccaggatgtttttggcgtgctgctgcagcaggttggcaccaccggtgaaatccacgattacagtaaacttatcgccgagctgaaagcgcgcaaagtgattgtcagcgtcgccgccgactttatggcgctggtgctgctgacggcgccgggcaagcagggcgccgatattgtcttcggttccgctcaacgtttcggcgtgccgatgggctatggcggcccgcacgcggccttcttcgcggcgaaagatgaattcaaacgctccatgccgggccgtattatcggcgtatcgaaagatgcggcgggtaataccgcgctgcgcatggcgatgcagactcgcgagcagcatatccgccgcgagaaagcgaactccaacatttgtacctcgcaggtcctgctggccaacatcgccagcctgtacgcggttttccacggcccggcgggcctgaaacgtatcgctggccgcattcatcgcctgaccgacattctggccgacggcctgcagaagaaagggctgaagctgcgccatgcgcactacttcgacaccctttgcgtcgaagtggcggataaagccgcggtgctggcgcgtgccgaagcgctgcagattaacctgcgtagcgatattcacggcgcggttggcattacgctcgatgaagcgaccacccgcgaagatgtgctgaacctgttccgcgccatcgtcggcgacgatcacggtctggatatcgataccctggataaagacgtggcgctggatagccgttcgatcccggcggcgatgctgcgcgacgatgcgatcctcacccatccggtgtttaaccgctaccatagcgaaaccgagatgatgcgctacatgcacgcgctggagcgtaaagatctggcgctgaaccaggcgatgatcccgctgggctcctgcaccatgaaactgaacgccgcggcggagatgatcccgatcacctggccggaatttgccgagctgcacccgttctgcccggtcgagcaggcggaaggttatcatcagatgatcgcccagctttcagactggctggtgaaactgaccggctatgacgccgtctgtatgcagccgaactccggcgcgcagggcgagtatgctggcctgctggcgattcgccactatcacgaaagccgcaacgaaggccatcgcgatatctgcctgatcccaagctccgcgcacggcaccaacccggcttccgcgcagatggcgggtatgcaggtggtggtggttgcctgcgacaaaaacggcaacatcgatcttgccgatctgcgtgaaaaagcagagcaggcgggggcgaatctttcctgcatcatggtcacctacccgtcgacccacggcgtgtatgaagagaccatccgtgaagtatgtgagatagtgcatcagttcggcggccaggtttacctcgatggcgccaacatgaacgcccaggtcgggatcacttctccgggctttatcggcgctgacgtttcgcacctcaacctgcataaaaccttctgcattccgcacggcggtggcggtccgggtatgggccctatcggcgtgaaagcgcacctggcgccgtttgtaccgggccacagcgtggtacagattgaaggcatgctgacccgtcagggcgcggtttccgccgcgcctttcggcagcgcttccattctgccgatcagttggatgtatatccgcatgatgggcgcggaagggctgaaacaggcgagccagaacgcgattctcaacgccaactatatcgctacccggctgaaagatgcttacccggtgctctataccggtcgcgatggtcgcgtggcgcacgaatgtattcttgatattcgtccgctgaaagaagagaccggcattagcgagctggatattgctaaacgcctgatcgactttggtttccatgcgccgaccatgtccttcccggtcgccgggacgttgatggttgagccgacggaatcggaaagcaaggtagagctggaccgctttattgacgccatgctggcgatccgcgcggaaatcgatcgcgttaaagccggtgaatggccgctggaagataacccgctggtgaacgcgccgcacacccagggcgagctggtgagcgagtggaaccatccgtacagccgtgagctggcggtattcccggctgggttgcataacaagtactggccaacggtgaaacgcctggatgacgtgtatggcgaccgtaacctgttctgctcctgcgtaccgatgagcgaataccagtaagtggcgaattagctaaacttttaaaggcgctgcggcgcctttattttttggagggaaggtatggcgatagctctgattagcggcgcgagccgcggcataggccgggcgacggcgctgctgttggcgcaggaagggtataccgtcgcggtcaattaccatcacaacattaaagccgcaaccgaagtggtcaataccatagttgaatctggcggcaaagccacggcgctgcgggcggatatcagcgatgaagcgcaggtgatggcgatgtttgaggcgattgaccgtatgggcgaaccgctgatggcgttggtcaacaacgccgggatcctgtttacccaatgtacggtggagagcctgagcgccgagcgtattaaccgcgtgctggccaccaacgtcaccggctacttcctctgttgccgtgaggcggtaaaacggatgtcgcatcggcatggcggcaagggcggggcgatagttaacgtttcgtcggcggcctcgcgccttggcgcgccgggagagtacgttgactatgccgcgtcgaaaggggcggtagataccctgacgaccgggctggcgctggaagtggcggcgcaagggattcgagtaaacggcgtgcgtccgggtctgatttataccgagatgcatgcttccggcggcgaaccgggacgcgtggaccgggtaaaaaattcgctaccgatgcagcgcggcggccagccggaagaggtcgctcagaccattgcctggctgctgagcgacaaagcgtcgtatgtgacgggtagcttcctcgaactggcgggcgggaaataacccgtagatgtctattgcccggcggcgctgcgcttgccgggtaaccttcccggatagcggctacgccttatccgggctacccaacgatgcgtacccgtagcccggctgagcgcagcgcgagccggggaaaccttcccggatggcggttacgccttatccgggctacccaacaacgcgagcggggaacctgacggtctaccaggaggccagccacagccgcaggcgcattccccaattgctggtccagccggtggtaaccgacttcacctcaccttgagaaatgaccaccagcgttggcgttacctggatatcccactgccgcgccagctggccgctcggatcatttaccgtcggcagcgccattttcttcctggtcagccacttctcaagcgtggcgttatcgccggaacgcagggctaccgtcagcacattgccgccgtcggcggcaagcgatgccaccgacggcgtggtatagcgacagactccgcaccaggtcgcccagacgtacagcagcagcggcttttgctgactcatagcgttcagatccagcgtcctgccgtcgagtgtctgcagcgatgtggcgctgaagttttgcggcagcgcgggctggcgaaaataatccaccgccaggcttaccgccgcgccaatcagcagccacaccgccagctcgcgtagccagcgtctgattttactggccacgggctttcgccagctgctctttcaccagcccctccagctcatcagcagggatcgcgccggccaccatctgatcgccgatgatggtcgccggggtgccctgaatattcagcacctgcgacaaaatcaggttcatcttcagcgaatccatggtcttgtcatcaatattcacgctatcggtggcggttttcttctgcgcggcggcgatactggcgtcatcgtgatagccttttttcgccatcagccgctgatgcagcgcccagaatttatcgggctgctgacgccaggtggagagcgcggctttagcggcattcaccgaactctgccctttaaacggcagcagcttaacgatgagctgaatatccggattatcgtggacgattttttccagcatcggatcaaactgtttgcagtaaggacagttgtaatcggtaaacgagacgattgtgagtgttggctctttcgcgccggtacgcgggctgttcggatcgttaaacagcagctgggctaactggtcattaccgttcgattgtggttcttccgccggtgcggcgaagctgaaggccgatacgcacagcagtaataaggcggtgatagctctcatgttattttcctttagcggcggacagggtggcgagaagttgttcgcggtctaacagcgcaggcagaatctgtccctgcggtaatcccggtccgtaaatctggttaaacggcaccgcggcgctgccgcgtgcggttaaaaactgactaatgtcagcggaggggcggctccagtcgccgcgtaaggcgatcacatctggcgctgatagcgcctgctggacgtcatcccgcagcagcacgttgtatttattggctttacaggtcacgcaccagtcggcggtgacatcaataaatacccgtttatgctccgcaagggcgttagcgatagcctgctcgctgagcggctgccagttaacccggtctcggcgcgggccctggccgtcctgttgtgcgacaaaggcgacggcgcccgccaccacgatggccagagcgcccgcgcgcagcgccgtacgccagcggtagcgccaggcggtggccaggagcaggaagatggccagaatcaccagcagggtaagcaccggcgtacggccgatgtggatcgtcagcaggctaaccagccatagcgctgaaccaagcatcattagccccaacaccacgcgcagatgattcatccagcggcctggacgtggaagtcgttgcgccagacccggccaggcgacgataagcagccacggcaggctcataccgatccccatggcgaagaaaatcccccacagcagcggcagcggcgccaccagcgctaccgaaacggcggtaccgaggaacggcgcggtacagggcgtcgccagcagggtggcgaaggcgccctgccagaaatggcccattaagccgttgccgccgcgggtggcgaggaaggtactggcgttggaggagaggcggatttcgaacagccctaataaactggcgctgaacagcaccatcaccagcgccatcgcgccgataaaccacgggttctggaactggatcccccagccgagcgcctgattacctaaacgtagcgcggtcatcatcagcgccagcgccaggaaggagacgacgattccgcataccgaggcgaggaactgccgccgcaccgcgccgcgttcacgacgttcggtttgcaccaatgagccgagtttcatcgccagcaccggcagcacgcaaggcatgacgttgaggataagcccgccggccagcgccatcagcagcacccagcctaacgccagccccggcgcggcactgccggcggtgatggcgatatggctttcctgcgcctggccgttatcggccagcaccagcgacagcgttttgccgctcagatccggcgccgcttcgccccagctatcggtgaccggtacggtggcagtcaacgtatcgccgtggctggtaaagctcggcttgccgaaatcgacatcctccatgctgtcgataaacagcgctggctgctgccagccggcatcgcggcgggcggttaccgtcagctttccgctgacgtagctggcgctaagcgccgaggtgagaccgtcgcgcaggggcagcgtgcccatcgcgcgggtgaaatcgtaattaaattgctcccccgccggagccgtcatatccagcgaaaaggggtagtcagtgagaatgcagacattgctgcaggtagagagcgtcagtacgccgcttagcgtcggcggtattttcccgcgcagggtcatcgggaagctgacgtcgccgtgatacccctgagtggaaatgcccgcgacgtcaaagcgttgcggcgtcggccagcgccagttaacctccagcggcgtgtgccaggcgatagctggcgcgatgccgccttcgcccggcgaacgccagtaggttttccagcccttttccagcgctacgtctaaaagcaggcgggtgtcgccattgctttcgctttgcgcccgcaggcgcacgctggcgtgttgattgtcggcggcgcgcagccagccgctatcggcggcctggctgacgggcagccatagccaaagcaggcagaccagcagtcgcctgaataccataaacataaattttctccgtaagtaataaattaacctgagctgtcaggagaattaatcactcacggaagacgcataatcgtagatgcacccgcaatcggggaggagaaatgacgcggggaggccagattcgctcgatgcgcggcgggatggccgccagcaccgccagcagcagggcgatcgctaatagcgccccttcaaacagcatcggcggaacggccatcagcgacttggcgctgagttcgcagggggagaccggcgcctcggcattatccgggcccggttgggcggattggctggcggccgtgacgttcatcaccaacgcatgcatccccgccattctctgggcggtgcagatcagcaccaccaggcaggcaagaagtacaagaagaatggctttgcgttgtcgcttaatcatggtcgcctcaaatattcacgagggctatcttatcgggcgaacgcgttttagcaatggtaaagctgtaaagaagtgtctggcggataagtgatttgccccctcccggccgggagagggcggttaattacagattctcgccgttgctggcaatgacttctttgtaccagttaaagctcttcttgcgcgagcgggacatatcgccggtgccgtcgtcgtgtttattaacgtagatgaagccgtagcgtttgctgtactggccagtggtgaaggagacgcagtcgatgcagccccatggggtataacccatcagatcaacgccgtcataagtcaccgctttaatcatctcttcgacgtgggcgcggagataatcgatgcggtagtcatcattgatgctgccgtcggcttctactttgtcgtaggcgccaaagccgttttccacgataaacagcggcttctggtagcgctcatacaattcgcacagggcgtagcgcaggccaaccgggtcaatctgccagccccagtcggaggctttcacatgcgggttcggcacgctgccttcgaagccggaaatggcatcgccggtgccgccttcggctttcaccgcgttggtcatgtagtagctgaagccgagataggcgcaggtgccttcacgcaggatctgcgcgtcgccgtcttccatcttgatgttgaagccgcggcgttcccattcattcaacacatagctcgggtagtagccgcgcagctggacatcggtaaagacatagcgttcgcgcatcgactcctgggcaaacatgacatcttccggtttgcaggagtaagggtagagggcgaccatcgccagcatgcagccgacctgcatttccgggttgatgcgctgcgccgctttcaccgccagcgcgctggcgacgaactggtgatgcagcacctggtacatggtctcttccgggttttcatgctcggtatagaccacgccggaacagcagtagccgaacagcggcgcgcgccagttacgctggttattgatctcgttaaaggtcatccagtatttcactttgtgcttatagcgctcaaagacaacttcggcgaagcgcacaaagaaatcgaccactttgcggttggtccaaccgccgtactgctgtaccagatgcagcggcatttcaaagtgggaaagggtgatcactggctcgatgttgtacttcagcagttcatcaaacatgtcatcgtagaatttcagcccttcttcatttggctgggtttcgtcgccctgcgggaagatgcgggtccaggcaatagaggtgcggaagcatttgaaacccatctcggcgaacagtttgatgtcttctttgtagtggccataaaaatcaaccgcttcatggttagggtaatacttacccgcctcgacctgttgggtgatttcgcgcggcacaccgtgcgctccgccggtcaacacatcgcagatgctggggcctttgccgcctttattccagccgccttcaacctgatgcgcggcgaccgcgccgccccacaaaaagtcttttggaagagtcaattttttcatctttactaatctctatgaatcactattgcgattgagtctagcaaagcgaaattgaatgtcacgatataacaaatcccgctaaaggtaatatgttacatcgaaaaaacaggctgttatttttagccgattttgcgcgctaatttacgccccagggattcgagaatatatatcaccggaatctgtgttgtaatatcgtaaacgccgccgatgcgcgtttgcggcacgtgccaggagagattgaaatcagccagttttgccagccgcgaatgttcatggctggtaatcgacatcaccctacagtgatgcaggctgaactggctggcaaagcgcaggatctcttcggtttcaccggagacggaaagcacaatcgccagcgcgttgcgagccatatcattggtgaccgggaaataaggatcgtcaatatggttgctgaatttcccgacgttggaaaagaagcgcgcgccatatttcgccagcgcgccggaagtaccggcgccgacgaaaataatacgctcggaggagagaataatatcgacggcttgttcgagcaattgatcgaactcgtcattattgacgcttttaaaaaagctcattatttcgctggcgccgatatttgcctgttgaggctcattctgctcaagatataatttaaaacgtacgcgaaattcagagtagccctcgcactgcagtttgcggcagaagcgcaacacggtagtggtggagaccccggcggcctcggccagttcgcgaatagtcatgtacatcactttgtcacgattcttaatgacgtagtggtagaccatcatctcaagattattgagactagcgacagcggcgtgggagaacatactcacagtggcgaactcacaattcataaagaccaggacggaattatatcatgcaggctaatgacattaccttttttcagcgttttcaggacgacatcctcgccgggcgcaaaacgatcaccattcgcgatgcggcggagtcgcactttaagcccggtgatgtgctgcgcgtcggacgttatgaagatgacggctacttttgcactatcgctgttaccgcgacctcgacggtgaccctcgacacgctaactgaacagcatgctcaacaggagaatatgaccctcgaacaactgcggcaggtcatcagtgaaatctatcctgcggaagatcggttttatgttattgaattcaaacgtctttaaataaaaccagcacaactgttagttgaaatattgttgtaacactatgattttaatgtgtttacaaatatacatcgttttattttagctaacaggtgttcactggaatcattctcagttaacctaagtgggcaatgaaagcgttcttgttttcacggagtcaaaatatggttcgcaaaccattaatcactcagggatattctctggcagaggaagttgccaacagcatcagtcacgggatcgggctggtgttcggtattgtcggccttgtgttgctgctggtgcaagcggtagacacgaacgccagcgcgacggcgatcaccagctacagcctgtacggcggcagtatgattatgctgttcctcgcttccacgctctatcacgctatcccgcatcagcgggcgaaacagtggctcaagaaattcgaccactgcgccatctacttgctgattgccggaacctacacgccatttttgctggtgggattgaattcgccgctggcaaaggggttgatgattgtcatctggagcctggcgctactggggatcctgtttaagctgactatcgcgcaccgctttaaaattttgtcgctggtgacctatctgacgatgggctggctgtcgcttatcgtggtctatcaactggcggtgaagctggcggtaggcggggtaacgctgctggcggttggcggggtggtgtactcgctgggggtcatcttctacgtctgcaaacgtattccttataaccacgctatctggcacggcttcgtgctcggcggcagcgtgtgtcacttcctggcgatttatctttacgtcggccagtcctgatcaaacgtccacggtggcgctgtgcttaccgtggctacgatattctgcggtctggtagcccggctgaggcgcaagcgccgtaagccgggaactgttccttaatcttcttccagcgaatacggcaatggcttgatgctcaggctgccggcatcatcacgcacgcggaacacgctgtccggttccatatcgttattcatcaccacctggaccatcaggcttccgtcatccaactgtacggctgccagcaccgtaccggtgcggcgccagttgtcgcccattttcagctccagatcttccccggcttccggcaccctgctggcggtgcccgccagcgtccacagcgcgcgtttattggcgccgcggaatttcgcccgggcgaccatttcctggccggtgtagcagcctttcttgaagctgataccgcccaacgcctgcaggttggtcgcctgcggaatgaactgcgcgctgtttacgctgtcgataaccggcagaccggcctcgatgttcagcgccagccactgctggctgttgttaagctgcgcttcgccgcgcagcgcgtctgtcacccggttggcggtgtcggcatcggtcaccagcaggaagcgttcggcagggtgttcaaaccacagcaggctggtcacgccttcggtgaccaccggtttaccggcatccggcagcgcggcgaacagcggtgccagcgcggcgcgcgcctggaaaccggcaacgcccagcaggaccagatcgtcgtttgcggcgatggtgactttggagaagacggcatattttttcagttcggtcagctgcgcttcgcgcaggctgcggcgctcaatccacgcgaaaccgccgtcgcggtggaagacgcgcaggttgctccacattttgcctttggcatcacagtgcgcggcaagcagatgctgatcggcggttaaatggctgacatcggcggtgatctgcccctgcagatacttctcgccatccggaccggtaatcgtcgccagcgcccaatcatccagcgtcatcagcgttaacggcagacgagcggaagaagagggctgacgcggaggaaaaggtgtaaaagccatagtcatatcctgaatagcttaacgcagagtgaatgactaatggtaaaagagctatggtgcaatgcaagcgctttcggcaagccatttgtgccctcaggatgcggtgaatagccaaccggattttgggcttttatggaatgctgctcgcacaaggcgatattactgtaaagtaagtgcctaaaaagggttaaactaagctatatcttgatgctggaaggacaacatggacattaacaacaaagctcgcatccactgggcatgccgccgcggtatgcgcgaactcgatatctccatcatgccgtttttcgagtatgagtacgacacgctcagcgatgacgataagcgcctgttcatccgtttgctggagaacgatgatccggatctgtttaactggctgatgaatcacggcaagccggcagatgcgcaacttcaacggatgattaatttaatccagactcggaatcgggaacgtggtcctgtggcaatctgatttacgtatttcctggcgttcgcagtggttctcgctgctgctgcacggggtggtggcggcgatagtgctgctcatgccctggccgttaagctacaccccgatttggctcctgttgctatcgctggtggtgtttgactgcgtgcgcagccagcggcggatccacgcctgccagggagaaattaagctgttaatcgactcccgtttacggtggcaaaaaacggaatgggatatcgtcgggacgccatgggttatcagcagcgggatgctgctgcgcctgaagcatgcggaaaccggccgtagccagcatttgtgggtggcggcggatagcatggatgcgggggaatggcgggatttgcgccggctggtgctgcaaaagccggcgcacgactaactcaggatcaggcgaagtgctccgccatttcgccgaggatctgctcgcaccagttctggatgcgctcatcgctcaggtcgtattgattggtttcatccagcgccaggccgacgaacaattggccatcggcgataaccggtttcgggctggtgaactcatagccctcggttggccagtagccgacaaacttcacgcctttggtcgccagcttatcgtgcagcatccccagcgcgtcaaggaaccattcgccgtaaccaagctgatcgcccatgccgtacagcgcgacgattttgccattcagatctaaggcgtcgagctgttcccagaccgcttcccagtcttcctgaatttcgccgaaatcccaggtcgggatgccgaggatcagcacgtcgtactggctcatcagcgcgggggagtcatctttcagattatgcagcgtcaccagctcggggccgatgatatcgcggattttttccgcggccatttcggtgtagcaggtactggagccgtaaaaaagacctatattcatcgcgtaaacgtctcaattcttgccgtgaattgcgcccagtgtaccagaaaggcggcctcttaaggcataatgagggcgtataacgaacaaagaggccgatgtgaaacaggatctggcacaaattgaacagtttctcgatgccctttggctggagcgtaatctggcggagaacacgctcagcgcctatcgtcgcgatttgacgatgctagtggagtggctgcatcatcgcgggctgactctggcaagcgtcggcagcgacgatttacaggcgctgcttgccgagcggcaaaccggcggctacaaagcgaccagtaccgcacggatgcttagcgccgtgcgccgcttcttccagcatttgtaccgtgagaaaatccgcccggacgatcccagcgcgctgctggcttcgccgaagctgccgcagcggctgccgaaagatctcagcgaggcgcaggttgagcgtctgctgcaggcgccgctggtggagcagccgctggagttgcgcgataaggcgatgctggaagtgctgtatgccaccggcctgcgcgtctcggagctagttggcctgacgatgagcgatatcagcctgcgacagggcgtactgcgggtcattggtaaaggcaacaaagagcggctggtgccgctgggcgaagaggcggtgtcatgggttgaaaattaccttgaatacggccgcccgtggctgctgaacggtgtggcttcggacgtgcttttccccagccagcgcgcgcagcagatgacgcgccagaccttctggcaccgcattaaacactatgccgtactggcggggatcgacagcgcgaagctctccccgcacgtgctgcgtcatgcattcgccacgcatttgctcaatcacggcgccgatttacgcgtggtgcagatgctgttaggacacagcgatctctccaccacgcagatctacacccacgtggcgaccgaacggttacgacaacttcatcaacagcatcacccgcgggcgtgagtgctgaataaaaggactgagtatgaaaaaaggtttattgatgttcaccctgctggcggcttcactctccggcgcggcgcatgccgatagcgcggcgatcaaacagtcgctggcgaaactgggtgtgcagagcaccgatatccaaccgtcgccggtttccgggatgagcacggtgctcaccgacagcggcgtgctgtacgtcactgacgatggcaaacacattattcaggggccaatgtacgacgtcagcggcgcgcagccggttaacgtcaccaaccagttgctggtcggcaagctgaacgccttaaccaaagagatgattgtctataaagcgccgaaggagcagcatgtcattaccgtctttaccgacatcacctgcggctactgccataaactgcacgagcagatgagcgactataacgcgctggggatcaccgtgcgctatctggccttcccgcgccaggggctgcaaagccaggccgagcaggacatgaaagcgatctggtgtgcgaaagatcgcaacaaagcgctggatgacgccatgaatggtaagggcgtgcagccggcgagctgcagcgtagatatcgccaaacattataccctcggggtgcaaatgggcgtcaacggcaccccggcgatggttctcagcaacggcatggtgctgccgggctatcaggggccgaaagagcttaaagctttcctcgacgagcatcaaaaacagacaagcggtaactgattcgcgtgaaacaacagatacaactacgccgccgcgaggcggttgatggcgtcgacctccccgccgacctgccgccgctactgcagcggttgtatgccagccgcggcgtgcgcagcgcgcaggagctggaacgcggcgtcaaaggcatgttgccatggacgcaactcaccggcgttgaaaaagccgttgaaatgctgcatgacgctttccagaaagggttacatattgtggtggtcggcgattttgacgccgatggcgccaccagtaccgcgctcagcgtgctcgccttgcgcgcgctgggctacggtaacgtttcctatctggtgccgaaccgttttgaagacggctatggtttaagcccggaagtggtcgagcaggcgcacgcgcgcggcgcgcagatgatcatgaccgtcgataacggcatttcatcacatgccggcgtcgatcacgcccataagctcggtatcccggtgctggtgaccgatcaccacctgccgggcgatacgctgccggcggcggaggccatcgttaaccctaacctgcgcgattgcgacttcccgtcaaaatcactggccggggtgggggtggcgttttatctgatgctggcgctgcgtactttcctgcgcgataacggctggttcgaggcccgcggtatcgccgcgccaaaccttgccgagctgctggatttagtggcgctgggcaccgttgcggacgtggtgccgttagatgctaacaaccgcatcctgacctggcaggggttaagccgcattcgcgccggaaaatgtcggccaggcattaaagcgctgctggaaatttccaaccgcgatccgcaaaagcttgccgccagcgacctcggtttcgccctcgggccgcgcctgaatgctgcgggtcggctggatgatatgtccgtcggcgtcgcgctgctgctgtgtgataacattggcgaagcgcgggtgctggccaatgagctcgatgcgctcaatcaaacgcgtaaagagattgagcaggggatgcaggccgaagcgctgactctgtgccagcagctggaacgcagcagcgacaccctgcccggcgggctggcgatgtaccatccgcaatggcatcagggggtggtcggcattctggcatcccggattaaagagcgcttccatcgcccggttatcgcttttgcgcctaccggcgacggcacgctcaaaggttctggccgctccattcaggggctgcacatgcgcgatgcgctggagcgccttgatacgctttatcctgggctaatcctgaagttcggcggccacgcgatggcggcgggcttatcgctggaagaggcgcgttttgaggagtttcaacaacgcttcggcgagctggtgaccgagtggctggatcccgcattattgcagggcgaggtggtttccgacggtccgctggcggcggcggagatgagcatggaagtggcgcagatgctgcgcgatgccgggccatgggggcagatgttcccggaaccgctgtttgatggccgtttccgcctgctgcagcagcggttggtgggcgagcgtcatctgaaagtgatggtcgagccggttgacggcgggccgctgctggacggtattgccttcaacatcgatacttccatttggccggataacggcgtgcgtgaagtacagttagcctacaagctcgacatcaacgagttccgcggcaaccgcagcctgcagctgatcatcgatcacctctggccaaattgacaacagtgtattaataagggcgcgaatccggtagaattccgctcttatcaccgcattttgacaaatccattaaaagaaaccgaccatgtttgaaataaatccggtaaaaaaccgcattcaggacctcacggagcgctccgacgttcttagggggtatctttgactacgatgcgaagaaagagcgtctcgaagaagtaaacgccgagctggaacagccggacgtctggaacgaacctgagcgcgcacaggcgctgggcaaagaacgttcttccctggaagctatcgtcgaaacgctggatcagatgacccagggtctggaagatgtcgccggactgctggagctggcggtagaagccgaagacgaagagaccttcaacgaagcggttgccgagctggacgggctggaagagaagctggcgcagcttgagttccgccgcatgttctccggcgaatatgacagcgccgattgctatcttgatattcaggccggttccggcggcaccgaagcccaggactgggccagcatgctgatgcgcatgtacctgcgttgggcggaagcgcgcggctttaagaccgaaatcatcgaagaatccgaaggtgaagtcgcgggcattaaatccgtgaccatcaaaatcattggcgattacgcctacggctggctgcgtactgaaactggcgttcaccgcctggtgcgtaagagcccgttcgattccggcggccgccgtcatacctcctttagctcggcgttcgtatatccggaagttgatgacgatatcgatatcgaaattaacccagccgacctgcgcattgacgtataccgcgcctccggcgccggtggtcagcacgttaaccgtacggaatccgcggtgcgtattacccatatcccgaccggattggtgacgcagtgccagaacgaccgttcgcagcacaagaacaaagaccaggccatgaagcagatgaaagcgaagctttatgagctggaaatgcagaagaaaaatgccgagaagcaggtgatggaagataacaaatccgacatcggctggggcagccagatccgctcttacgtgctggacgactcgcgtattaaagatctgcgcaccggggtggaaacccgcaacactcaggcggtgctcgacggcagcctggaccaatttatcgaagcaagtttgaaagcagggttatgaggaaccaacatgtctgaacaacaagcacagggcgctgacgcggcaattgaccttaataatgaactgaaaacccgtcgtgagaagctggctgcgctgcgtgagcagggcgtcgcattcccgaacgatttccgtcgtgaccatacctctgaccaactgcacgctgacttcgatgccaaagaaaacgaagagctggaagcgctgaatgtcgaagtggccgttgctgggcgcatgatgacccgtcgtatcatgggtaaagcgtctttcgttaccctgcaggacgtcggcggccgcattcagctgtacgtcgcgcgcgatgacctggcggaaggcgtctacaacgatcagttcaaaaaatgggatctcggcgacatcatcgccgcccgcggtaagctgttcaaaaccaaaaccggcgagctgtccatccactgcaccgagctgcgtctgctgaccaaagccctgcgcccgctgccggacaaattccacggcctgcaggatcaggaagcgcgctaccgtcagcgttacctcgatctgatctccaacgacgaatcccgtaacactttcaaagtacgttcgcagatcctggctggcatccgtcagttcatggttggccgcggctttatggaagtggaaaccccgatgatgcaggtgatcccaggcggcgcttccgcgcgtccgttcatcacccatcataacgcgctggatctggacatgtacctgcgtatcgcgccggaactgtacctcaagcgtctggtggttggcggcttcgaacgcgtcttcgaaatcaaccgtaacttccgtaacgaagggatctccgttcgccacaacccagagttcaccatgatggaactctatatggcctatgcggattataaagatctgattgagctgaccgaatccctgttccgcaccctggcgcaggacatcctcggtaataccgcggtgccttatggcgatcagactttcgatttcggcaagccgtttgaaaaactgaccatgcgtgaagctatcaagaaataccgtccggaaaccgagatggcggatctggataacttcgattccgcgaaagcgatcgctgagtctatcggcatcaaagttgagaagagctggggtctgggccgtatcgtgaccgagatcttcgaagaagtggcggaagcgcatctgatccagccgaccttcatcaccgaatacccggcagaagtttctccgctggcccgtcgtaacgacgtgaatccggaaatcaccgaccgctttgaattcttcatcggcggccgcgaaatcggtaacggctttagcgagctgaacgatgcggaagaccaggcgcagcgcttccaggatcaggttgatgcgaaagccgccggcgacgacgaagcgatgttctacgacgaagactacgtcaccgcgctggaacacggcctgccgccgaccgccggtctgggcatcggtatcgaccgtatggtgatgctgttcactaacagccacaccatccgcgacgttattctgttcccggcgatgcgtccgcagaaataatcgcttttcgcgaaaagcaaaaaacccggcttgccgggtttttttatatttgatgtcaaggttcgtcgctggagtagcccggctctttaatgctcgtcactcgcggttacgcgcgtaaacgcgcgacaaagtctattaaagcctgacgcgcgtttttgtttttggcttccagcaccatccacgggctaaaggcccacggggtagcggccagcgcgcttaacatttccggcagctcaacccactgataatccatcacttcatcatcattaggttgtagttcgctgaccacgcgtgcggcaaaaaccgggcagacttcgttttcgacgatgccattcggtgcgacggcgcggtagcggaaggccgggtggacgggggcaatatcagcgatctcgacgcccagttcgaagtggcagcgccgggtgacggcctgctcgaaggtctcgccctgttgcggatgtccgcacactgagttagtccacacgccgggccaggcttttttgctaagcgagcggcgcgtgaccaggaactggccttgctcattgaacaaccagcaggaaaacgcgagatgcaaaggggtatcgagcgtgtgggcggcatacttctccagcatacctgtgggtttatcttgctcatccagcaaaatgacgtgttccccggccatgacgactcctgaaaaaaataaatgacccggcacaaacccgccgggtcatgtactcaggccactagggtagcccataaatgggagaaaggcattaccaaaacaagccctggtagcatgttggcgaccgggaaaagcttgatgttacagatacgcaatccggtcgctaccatcagcaatccaccggcgcaggagaaatccgccatcattgacggggtgatcatcggcagaataaacaccgccagcatcgccagcgccacctgaatgacgatctgcgggatagcgatggtcatcaccgcgtaacccagcagagttgcgaatatcccggcggtgaacaggtcgaggatcgttttaatgtacaggatcgacggatcaccgctcataccttcggtcatagcgccgaaaataccggtaccgctggcgcaaaacagcaccaggatagcgacgaatttttcggtgaactcctcatgacctaacccctgaacgggcggcagaactttattaatcaagccgcgcgttgaacccgccgcgctgccgatgcgtttttccagatgcagcagttcgccgaggaaagcgccgagtaccatcgccagcactaccgccggcatatatttcaccttcagcaccagggtgatgcccaggccgacggaacagagaccaaaggtcatcggtagcgcggttttgacgcgttccggaagtttgcctccggccatggcgccgatcaatccgccgataatcacggcggaaccatttacatatggaccaattaacattgcgagttcctgttacgcgtaatgcagcgcgccttcaccccagcgcgggatgttattgacctcaaggtcaaagaggtcgagcgcgcggttcacgctatgggtaataatgtcatctgcgctttgcgggcgttgatagagcgccggaaccggtggaaagatgatgccgcccatctcggtaaccgccgccatattgcgtatatggccgaggttgagcggggtctcgcgtgctaacaacaccagccggcggcgttccttcagcaccacgtccgccgcgcgggtgagcagattatcggtgagacagtgggcgatagcgcccaatgaccgcatcgagcagggggcgactaacatccccagcgttttaaacgatccgctggagatagatgcgcccagatggttgatagggtgtaccacgtcagccagtgccatcacttcgtctaagcggtaatccgtttccagctcgcaggtcttttccgcgcctttggagaccacaaggtgcacttctaccgctagcggctgcagaagctccagcgctttgacgccgtactggaatccggaagcgccgctaatgccaatgatgatgcgtggtgtcatggtatttgcccttattcgaaatccggcaggaaacgttttacatcaaccgctttgaacttagagcgctcaaagttgtgcttcagatggaacggtacggtgcagtcgaaaatggttttacacgacattccctgctgcagaatgctggggctgtattccggcacctgcgacggatcgagcggatggcagcgtacgccagggatcaccacggtatcgacatcgccctgataacgggtttgcatcgcccatagcacgtcgtcgctatcgaaaatatcaacatcttcatctaccagaataacgtgtttgagttccgggaaggcggagaacgccagcagtgcagcctggcgctggcggccttcatcggctggagatgattttttgaattgcagcaccgcgagcagcttgccgccgcccgccgagtgggcgaagacgttgagtaatttgcccggcatggcgcgttctaccatatcgagaatactggcttcggtcgggatcccggccatgttgacatgttcttcgcctggcccgacagtggtgcgccagatggggttgatacgatgggtaaccgctttaactttaatgaccggaatcgcctctttggcttcgccggtatagccagggaactccggcatggcgcggccggtattggtgttttgatcttcacgcacgcgtacgttcggcagcagttcgccttcgataacgatttcagcgtgggcgatggctttttcattaatggttttacactgcaccatctccaccggatggccgcgtagtgcgccggcgatacttagctcatcaaagcccagcggggtggtcggcggttcaaagcaggcggcgatttcgatagccgggtccacgccgatactaatcgagatcggcagcggctgtcccgccgcttccgccttcatgcggaaggcatcgatatggcggcccggcgtcagccacattgagagttcatcgcggctctgtacgcacagacgatgaatggtgatatcggattcaccggtttgcggatcggaggcatagcacaggcccatggtgatatacgggccagcgtcttcttcggtgttggttggcgcaggcagcagtttgcgcagatcgaaatcatcatcgctggcgaggtgcaccacttcctggcataccgccgcgccctgcaccatggtcggggcaatggcattttcaacggagtctttcaacaggtgacccagtttcgccggttcgcactgcaggaactggctgacgcgctggcgtgaaccgttcagaccgatggctacgctgatgtcgttgaagcccttaatgttgttaaataccatcaccgggccgttcttacgcgtcggacgctggcaggtaccgccggcgcccacgtagcgataaacgccggagagctcggcgtggggatcgacttcggtatcggtttcaacatattcgcccggtagcgtttttaatagcgccagcgcagagcgtaaatcatgcaccgatgacggcgcttttttatctgagtgtgccatgagtgttcctttgggaaagcaattttgctaaccgcacaatatttttgttcgaataattaaacaaataccgtttaccggatggtcagtagatcaaaaaggtttaatttaaaaagctgttaagaaatgattaattaaaatggataaattggcgcggctttttatttgattccattagtgcaatactgacctccagataaagaggggttagataatggatctgaagcgtttacgctatttttgccgggtggtcgaacatggctcggttagccaggcggcgaaatcgctcaacatggcgcagccgccgctcagtaagcggatacaggagcttgaagaagagctgcaggtgtcgctttttgaacgccgcggcaaccgtattgaaccaacggaagcaggctattttctttatcgtaagggttgtgaaatattacgccaggtggaagataccgccagggaaacggccgatattgcgcaaaagacccgtgcggaagtgcgcgttggtttaactcatctttatcaaaactattttcagcctttattaatggagctctatcggcgaaatccagaaacggcaataaatatctcggtgaccgattcaagtcatctggaaacgttattaaatgaaggcgctatcgacctggccttaatacagcgaccctaccgtagtgagggtttcgattatgtctcctttgacccgataaaattggtagccgtcattaataaaaaatgtctgccgcagccgccgtctaaccccttcgattataacgcgctggcgacgatgccgctggtgctgcttcaccgggcgaaagattccggcacctatgagatgctgatggatctgtttcgtaaatccggcgtcagcgcgaaagtgattatgcatattacccaaccaggagtaattctcgactggctggagggcgggctggaagcggcgacgttgttgccatcctcggaagtgaatgctgaaaaactgcctcattgctatgtggttgatgtcttcccctcgccacagatattttatccggcgctggtgaaattaccgtcgatgtcgtatctccccgcgttgatggatattatcgccggaggctatccatttaacgcgccgaagggagtagaggtcgtagaataagcgtagaacattggggatcgtccatcgggctggtatgatattcgcccatgacgccgagatgagaaaccgttgagtgcaggacgcctgatgaaaacacgcttttatatcgcgataatgctgcttgctagcctgactttagccggctgttccagtacttccgattctgggtccacttataccgtgaaacgcggcgatacgctgtatgcgatctcccgtagtaccggcaccagcgtacgcgatctggcgcgcctgaataacatctctccgccatacactattgaagtcggacagaagctgaaacttaacggcggttcgaaagcaaaaagcagcaccgccgggaaaaaatcctccagcacccgtaccgccgccgtaacgccatcatcggcggtgccgcagtcctcatggccgccggtggggcagcgctgctggcgctggccgaccagcggtaaagtggtgatgccgtactccacccgcgatggcggcaataaaggtattgatatcgctggtacccgcggccagccggtttacgccgccggcgccggtaaggtggtctacgtcggcaaccagctgcgcggctacggcaacctgatcatgattaagcataacgaggattacatcaccgcgtatgcgcataacgacaagatgatggttaacaatggccagagcgtgaagattggccagcagatagcaaccatgggcagtacggacgctgattccgtacggctgcatttccagattcgctatcgcgccacggccatcgacccgctgcgttatctgccgccgcaaggcagtaagcctaagtgctaaaaggttattttatcagcagttagcccaattcgggcttgccacagggtgcgtaaggtctataatgcttttcgcacctcttcgcgggcgtagttcaatggtagaacgagagcttcccaagctctatacgagggttcgattcccttcgcccgctccagatctctccccttgtggagaagccttaaaagccttctctatcagcaacttaaatagttacctattttagtcgcctatgggttctaccattgtgatccgcccttggtaactgtcacgctaagttacatggtgagatgacagtataactcagcgttggcggcagttgcatcctcacaccgcgacagtaaaacgtgaagaaaaagcccatcctggcattgttatgtcatcgacagactgatcacacgcattcaagcccgatgtgtggccttatgagccacgtaaacaggtttatggtgattacgtacctacagacgatatgtaggctctatcagcgtctcagccacgctcccgcaagggtacacggttatcctgataaggtgtgatccctctgacagtctgatgaagtcgctacgctccgcttgttgctgtatcaccaacggggctttatggcttctattgtccaaaatcagagagttgcacaagttatgctcgatagttaatctgagataaatcttagattgcaagaggtctcttgatgtcttcaaaatcaaatcgaacatacaaatatggcgaccaaccgatcagaataactactgtgcaagtagttgctgaacagttcgggggagctgcaacggcgaagcaagtagatgcttatctgaaagagcgatttccgcattataaagacgacacccacttgaatctcattgtcaactcagtcaactgcaatcgtagctactggagtttcaacaaaacagccaggcgaactgatgatgtaacccatcggcatcatgagtatgaccgattgttcaagcgagggaagacctttgaaatctatcaaccctctattcatggtatctgggagttgtatcaggatcagcaaggtaaatggtgttaccgtaaggtgaaatctgagtttgaaaaggctgttgatggtgcgtcagaactgcccccgtcagaacgcaaaaagattttagacgctgagaataacactcctgagctaatcgaggttacaacgcgagtttataagcgaagcccctatgtagtagccgaagttctttcaagggctaatggcaagtgccaaagttgtatgagtgacgctccttttctcaaagtagacggcacaccatttcttgaggttcatcacattgagtggctttcgaatggtggggaggactccgttgaaaatgcgattgcattgtgcccgaactgtcacaggcaggcgcatttcggcgtcttggagttagcaccagttaacaaataaaactaaatcttatgacgacttattgtttacgagttaaagtagaatctatctttgatagtcgttttttgcatctaagggtaaggttataatctgatcactttgattttttagtaagggacttttcaatggctgatccggcttctattgctgctatctcaggcactcttgaacttgttaacaaatccgttgacttagtgcgtaatcttcgtaagaaaggggatgacgaacttaatgccgcagaaatgcgtaatacgttgatcgatttgcttgatgatttggtagaagtaaaaagtgagttcgtcagcctcaaagctgttttgctaagcaaagaagaagagatccaatctcttaaagcccaacttgatgggaaaaataaacttcagtttgacggcaaactatattggctggaaggggataaaaccccatattgcactaaatgctacgagaaagactcattggtattccatttaagctttattcatgctaatcgtaactggaatagtagtgagcactggcattgcagaaactgtcaggcaaactattatctacgatagtggctataacttaaatcatacttccctttgttcattactaacatagcaaaagaggttattatggaagttaaaaaggtttcagtagaagactatagagcagatatggggttgatgcggggctatagttttgattctcaagagatccaagatgtaaaaagcttttattatcaggaggctgtaaaacagttaagtaatctcaactgtggcattgaaataataagagaagacgaaaataaaaatgtccttgtgttcaaagtaaatgaggatcttaagtttcaactgactcttttgaataacattaaatacttaagcgttgatcttcatgcttatgagaaaaataatcgatatgaagatgtactaagcgagcagtatcactatcattgcaagggcgatagtgattatgagttctcagatgttgaagagcatttagaatatgatagggtaggccagcatttccgccatatgctggtttgtttggtcaaagagattgccaaaatcgaagattaataaaatagggaggttagcctccctatttttatgatggaatatcttcatctcagcgttactcttttaatacctgttgaatacttcgttcgtagtgcgtccactttggcttgagttatgcccaggtaggcgcgtgtgtgttcggtggagcgatggcccaacatcttactaatcacctccaaatcctcgccctgcgcatgagcgattgaggcgatcgttttgcgtgaactgtgcatactgatcactgcgtcctgtggaagtaggccgcgcatcttgagcttgtccactgcatactgaatctctgcatggattttagaacggctgatcggcttacccttgctccggttgctgtcattctggaatacatacacattttccccgcgctcgttatagcgagctttgagcacctcccgcgctgtctccgtcaattccacctctaccgcttccttggtcttgtcttgggtgatgcgtagcaccttgctaccaatgtccagttcaacccagcgccaggaacgcatatctacgccgcgaagctgtgtctctactcctaaaaggaagagatccgccactgtctggctcttcttcgcgatttcttccactaccagcttcacctgatcggcgctttcaagtccgtctgtacgctttgcacctttactgattgccatctatctacctcctcagtttgttttgatggagtaaatattgatcaaaaacatatagatagcaagatcaattttaaactatttgcataaatgtcttattcagggtgtttcgacggtattaagtggcattaaacgcgattaaagccgatttagcggagcgcggttgcttgagtcgctgaacggcgtgatcgaggccgccccaattccaccgccagcaagtgccgaatatcaagttattgatttgtaacgattttatttttatgacttttgtttcatggaaagttgttattgtcaacttatttatttttccacgctgattttgccccaggaatagccgaaaaaaggccattaaatcggggtttatcctaagtggttgtttctactggatgatggataggacagataacctgaatgtcctatttgtgaagcgatattgcctgaaagatgagaatcgttatcgattacattgattgtatggtgaaatgattagaatgctaattaattggtgggtttcagcatggaaaaaaagcgaattgttactttataacaataaaatgagaaactcgttcaacgaatccggcacgggtgcaaagtggtttttcatgacaaacagcggcgtatcccacgctacacaacggtttagctaagtggggcattcttacaatgaaagtgaacaatctactttggcttacatctacaccgattctttacctgtcatttaagataggttttgacgttattaatgtggggtttcgatagggttaatctcttgttactcttagtgttgttgaatgtgcgattcgtagtgagcagggcgacggtctaccgttgggtgaagggctgaaagtgacgttttgttactttcgtaatatacgggaaaaacccgtatgttcagatgttggttaactggatatacaggaaaaacccgtatgtctgcatgatgatatacaggaaaaacccgtatgtttcggcatgatatacgggaaaaacctgtactatataaagagattctaaaagcgatctctaaaagagagcttttagaagatctatgtttttgcgcttgtcgcaaagatcattttgctggcggctcttcgccgtcactcaaggggaaatgtcctggtacgccgtttggtggcttcccggacacccacgttccgctcacgacgctacgcaagttacaccccctatatggtgcaatggcgttagccaccgtgaaaacggttgcacatgatcacttcgccgtgggcgaataccattgcgctgtgcgctttgttaccatctgaccaaccaactaccgttgattgaccatctgataagctgactaacctcaaccatccattcatgaactaacgttcacccatgcaaggtttcagtaagtcagtggctaaggcttcactggtcgctgatagctccagttcatccagcctcaatccaataccaacacctactatcctgataactaccgttatccctctgtagttgtgctattggtttcggtaagtgccagagggcgcacaggaagcccgtagagcgatttaaacagggtagggaatgcaatggtagcctgaaagcgtcagaacgccgcagagagcgttacaggctgtttttcgttgttcttgtggctgtcttctctggtggcaagttctaccacaaaaacagattgacatccactgtttattttgtgtataaagagcacaaatcgcaaagcagaaatgcaacgcattgaaaatgatcaaaaaaatttagaataatcaccgttaaggggttgacaaaagtttagaaataggttagaatacccatatagcataaaactttatccacataatctcttaatgcactttgagccgtcaggctgcaaggtgtctttttatttacgccaaccataggaggccacactgagatactttgacgttgaagacacacttcaacaattgaaagacggaaccaccaaccgttaccgcatccgagcattacgcaacgcttgccgcgctcgcggataccatgaaagggaagcctttcttacagaagtgttgaagcgatgggatgaaattcgagcttcgactacagattaaccagcaataaggagaaacgatatgagcgaaacccaaaagaagaaaccagccggaacattcgtaaaactgccggatgaagtgtttaccactttgttcaaagaagcacgagcgcgaggcttaacagtgcaggagatgttaattgacgctgcaaccaaactttccacatcaattcagagcggagaacgttctatcaaataaggatacaccctaacatgactgacattataaacagtaaggtttttagttttaccaatacagaagacgctttcaacgaatgcacccggatcaccaatctgaaaacgggcgttacagtttcattatcaccaacaaacaaacagctatttgtaagaatacgccatcgttttcacaattttgtgaaaaagagaggtgggaagtattacgacaacattgatcagcttggtgagagtgtcggggtaaaatacgatgcagcaagcgacggaataaagaaacttaaagctgtggggctaatttcgggaactattaaaggcagatcctaccagtgggaaagcgttgcagatctaacgccagaagatttcctcttcgagcgtgatattaacgcgatgaaacgcaaaaccgcgcctgaatgggtggattgtctaaaacatccagtgtttggcaacgctaaagaagacgtagcgccagaggtgcaggaagaaaagcaacagtctgttccagaagccgatccgatgtgcgagtttgacgatacgccggaagaggaagagccagcgccggaaaaagtggagccagcaccgaagccaaagcccacgaagaaaccagcggcaaggaaagcaccagacaaacagcaaaccgtttccccgttcgagtttaaaacgccacgagatgaaacaaaggattggtggtatctggaacggtgtaacgatgccgatcagtttactggcctcaccgattttgatttgccttatctggcgatgtttgaaaggcaggggaagttaactaatcaacattcaatccaacatttgaagatgaagcgtgaattatatgcacgacaacaacaaacctaagaggaacaatgaccaacttatatttattgaacgaagatacaaagtttcaacttggctgtaatgaagtttgtaaaagaatctacctacatttatcaagcctacatcgagagaatggaaccttccgttccagcgtcaaaactctggcatctgtcctgggctacagtgaatccggcatacgctactggttgtccctaatgaaggatgccaaagtgattaccatcactcgcaggggtggatattacgactttgacgttaatcacaacgtttctttcatcacctcgaacaattaacgaggtgcaatgagaaaacgggaacgtagtaatattgtcagaatagaaaaagcagcacgagcaacaaaacgtaaattcaccaccacgttaaaagattatgcacgggaatcaatcccaggcgagctaataactaccgttcgagaatatcccgcagcagtgccaaccggatcagagtttgaactattgcaggacgttctatcgtcaacggataacgtttattataaaccacgccgccgccgtgaataccaagttgattcttcaaatctccagcattggcaggtgttgggcttccagcattacgccgattatgttggatattcacaaactaatggcctgagcggtcacaccgccgattttgattttattttccatgacgaaaaggaaattcacgactgatgcacgtacagacaacacaaactaaaagattcgcgcagcatgttaaatgctgccaatggtattacgaagagatcgacctcatcaccaatgatgcttatctgacagatgaagagaaattagcagccctcgacgaactggaagacaagattctcacattagccgcgccattcctggcagtggcgaccacgattaaagcctataaggaacgaatgacccaatgaccaaaaccaatatcgacacactattgcaagacttccacgaccagctacatattccgctacttgatgcctgcattaaagccagccgggagggaacgcctgagaacctcacagcagcgttgaaactgctgcatctggcatcggtggcaatgcaggggattatcgctgtagtggagagcacagagagcctgagcgacgatcaggacgtgctgggcgaagtgtccagaatggcacagtctcttgtaacctgtatgcaggatttagacgcgcttgcgcatgacatagccgaagaatacgcagtactcgaaactgaataaaaattcatctaaagtgaatcaatagcttgactttgtaacgaaagtgttgtattataagataaggaaatgaataaacgtatcgaatcacgtttctctcccttgtatgtcaatccaccttagagaatgccgtttcccataggcggcgctctctccctctgaatattctctctgaaagctggttgttttcctttgttgtgtttagttccaaagggtggcgcgggcgttcccacttgtgtcgggtggtaacgaacaatcaccgcgcacattctctttcagagagcatattccgtgctctaaaccttataacttccgttagggattataagcggtcagacaatctcgaagatgtttctttgttacgtctggcattctcttattattgtttccagcgatgataacgagattccactttcccacttcttgccatgacagaagggcttctgttttgaagtgggagcaatgacgggcgatcctactttttgtttacatctgtattcacattgcgccctcatttattcaagaaggtattctttaacatcttccctcctgaaaatgttaaacaatgcctctctaacaaggtatttctccaggggcttaatcgcccctttttaataaaatgtgtgcagcatttaagttgtacccagacacaacgcgaaggaaacgaacaatgtttcttattaataacaaatcgcgtgtactcaaatacaaaaatgatgttctcaccatcaatcctcaaataattgagcaggtggcgcagtatgcaggttgtgaagtgtccgacgtgatcaaggcaatggaaacgtatttccctgatgaatcaccagaacaaaagccaaccattgatgatttgattgcacgtaaagtaaaaggactcaaccaaacaaaatgattattgatcttgatacgctgtttccacagcgcctttcactaacagatctggttagttattcaactgaccattttgcctctatcgagagcaagatttttgcctctcttcctgctgatgttgaatgcggcgatgttatcggggctgatggctctctgtacacctccggcgctgatgcctttgtggtggtgagtgaatttgtcactgctggctctaataaagccgtcaacgtcctacgctctccggcgcgtggctctcttgtctgcatcaaatctgacaacctcaccgctgctgatggcgcacacgatgccgctgtagctgccctggctgctcaaggcttccagatgcgcgaattcttcaccagttaatcaaggaaggaaaatactaatatggctattttaggtcaaaactacgtggatctttctccactcttcaatctgaacccaacacgtaactatctgctggcctcattggggctgttcgatggtgtgggcgtttcttctcataaagtggcggtgagccgtcttgttgaagataaccgttctctgttcaacgaacctaccgcgcgtttctcaagtgagcataacgttacagcacggcagaacgggaaagaatggctgatcgagcttccgtatttcctgcgtgaagaccagatcactccggcagatatccagggcaagcgtaaacctggcacggacacccaggaaaccctcaccgatttattcacggattacactcacaagcacagcgtggcgtttatgcgtactcgtgagagctatcttgcacgttctctgttctccggtacggtgaacaccccgaaaactgatgatgtgctgatcgactttggcgatctgttcggcgtagcgccgatgaacaccacgcttgatctgtctgctacagacagcagcaccctacgtgcaattgacgatatggtgagccagatcaccgaaacggctcaaggtatggcggcacaagtagaacgaataatcgtatttgctaaaggtggcttctatagcgatctgcgtttcagccctgcaatggaagcggctttccgctacgtgtctcctctggatgaaagtaacgttgtctatcagcgtcgtgacctcctgccaggcgtgagcactttcagcattccaggctcaaacgtcgatgtgatcaaagtgacagatccactgttacttgcacagatgggtgatgctgatgctatcgctatcccgcaatttgcggctggcttgaacgtttaccagaacatctacggcgctccgtcgagcaactttgaacttctggacgctaccccagcagaaacctatagctggagctatgaaagcgaacgtggcgacgtagtgaactgcatcaatgaacattcgtcgttgcctgtgaataacgggttgggcttctccgtccatatcaaagcctcagaataatgagcaaagcggcagcctgggccgctggaaaataatcaggagttttaatgagggatgcaaactaatccacagcgcaattgtggctctggtggcatcccttttttgtttccataaacaagaggaaaaaccaacgtggaaatgatattgaagtcgagccgtggcttgcacgtccgagtgagtgcagatgatgcagaggggcttctcaaggtgagccagctttgcgagctattagagatttcctatacgggcgtaagagcacgtattttccgtggtgaaaccgttgagcaagcaattcatcacttccttgatcagaaaggcggtggtgatgcttgagattaataccagtaagattgtcaacaccgtaactttcaccgtagataaaagcagtattgcggaggcgaaaaaagccgccgatgacctgcaacgccattttaagaagctggagaatccgaaaattcggtttcaggctcagaaacaacgccgacaatcagcaagggaaaaagtggcagatgctaaagcggcttctcctaaaacgtccaatgacttgaagcagcaacgccaggcagaaaaggcagggaaagcgcaagccagggaagcagcgaaaattgcgaaacgtaatgaaacggctgacatcaaatttaaatcggctggcttacagcttcgtgggattaaaggcaagtacggtttagatcccgcgaaacaatacgaggctcttaaattcattcaacaagaaacagaagcctttaaaaaggggctaattacaagccaacggatgaactttactattcgtgagcgaatcaccgatctacgccgtgaggctgcattacaagcccgtattactgccagtacacagcaacaggcggcagcacttaaacacgtcaaacgtacagactacaaaggcgcggcggctggtatcaaagagaaggggctgaacgtgatcggcggtggtgctcctcttcttggcgcaactgctgcccttgctgggggcgctggcgtcctgtctcgtatccgtgacaaagggaatgaaaatctggagcttgtgcgtatgtccgagcgtaccaaactgaatcctaacgctgttaaggcgattgtagcttggggccaacagcacggcgttgattctgcctctgtggacaagatcaccgatggtttcgggaaagatacccgcgagaaaatcagtgaaaccctgatgaacagccaattcgatcagaaatcaggaaaatggaaggggggcaactcaaacatcgaagaaatccttaacaagtttggttggggcaaaggtgctattgccaaatatgaagataaccctctggacttcctccaatcgactgttaacgaggggcaaagacgcggatattcagatggggagattgctcaccttcttgagaacatcttcgacgatggggcgcactatgtagacctgttcaagaataacggcgagcagttcatttctaccctgaaaaagttggttgatagtggtcagacgctgaacgacgagcaaatcaagcaaacttacgctttcggcgatctgtctgtggctatgtcgtccttaatgaacggcgttgataacagcatgttcactggctttatgaagggattcgctgacgggggcgacgagcttgttaaaaacacgcaagttatcaccgaagcggcgggaagcctgggagagggcttaggcaatctctcgaaagaaatcaccggatttgtgggtgagatttccggcgtagtgtccgatctgaatgctgggcttcgttctcgtttccctgattggtttagcgatgctaacaagccagcggcccaggctctctatgatggtgctgtgggagattcagcaaatgccacggctgattggattaaatctaagacgggagtagatactcgcgaatttggccctgcgatcatggattggttgggcgttggtggtggcaatgtagggacggcagcgagccaatacagcctgtctggtgattatctgcgtgatagtgctatgtcttttggtggtggtgcgccagcgtacacactgaatcctacattcaacctcacggtagcgccggaagtgccgttgaccattcaaactgacacttccaaccttgcggattatgtcgatttcacggctaaagcctcacaagccagcttcgcacagtcgctaaccttgtcagccttgagcggtcaatcgtcaacaggtggatgattctgggccagaaagccatatcttgtatggttttggtggtaaatgtgtatatgttgtgtttttgcttgacgccgcttcgcttatcctttagtcttaaaatggcaagcagttcaatctttatcctaagatgaggtgtttttatggctaagcaaaaagtagttcgttctgcgataactggtcagttcgtaaagcctatagaggccaaactgcatcccaatactaccgtaactgaaactgtgaaaatcccttcgaaaaaagggaagaagtaaaaacatctcaagcgcccacagcggcgctttttcttttaaatttatggagagaattgaatggctaataatttgttcattacctacgatctgattaaaaccaaagattatcctgctgtgcatgaagctatcaaagcattaggcaattgggccaaagttacagagtccaactggtatgtaaattcgaattattccgtagatgatgcggcagaaaaagttatggccgcaatggataatgacgataagttgattgtggttgatgccacgaataattctgccagttggtataatcttaccgatgaggttgaaaaccacattaaagatcaatggtataaataaggtaatgggggagcgactcccccaagtagctacatgtcataagtaactaattcaatatatcccgctaattcctccatattcgcgccctgggaataggtgcggaatgcttccgttttggctttttgctcagagtggcccgtaatactgccgatccttgtttcgctaactccggcacggtcaaggcaggtgatgaacatcccgcgcaagctgtggaagcattgccgatctgtagcggtaggcaatacacgacggcgtagcctggtgaacgcttgagagtagaacgggcctttcttaccgtcagcgcggttaattttgttagcctgtgggaataggtactcaccgtaactgtggttcatgtattcatcgactatcgcagatagccgggagtgaatcggcacatacctgatccccgctttcgtctttgacttcgagatgtagaaacaccgtaccccttccacagtctggatctctgatttctttaggcttgccagttcatcaaggcggcatcctgaatacaggcccataatgatgatgttcctgatctccggctctgctgcattaagtagcttttgcatctggtcaggctcaaaaggctgatagctctcgattgttcgccttgcttcgaggttatgaccgtgaaaagggttgcggtctggtatgccatcgtagcggcgctttgcaaactcgtagaggctccctaaacacgttagccagttttgacgagattgatcggcggctcccttctccttttgagcttcgaggaactcagtcaccaggcgacgacctatcctttctaaggcaatgtccggttgtttggcactttcaaggaatagctcaacggctcgcgctgatttgcttaacgttgaataagagcggcggtctttatagctttcagcgtattcgtcccgtaataggcacagagtgggaatcgaacaggatcgcgctacgggttgagggcggctcttattcttcttaccttcggtatgcaaggcggctattgactgctgcaaccactgatccgggttgctcggattgtacttccgcttaagctcttcccattctaacaacaggtggtttctaaaccgtcgagcctcgttgagatcgcgggttgaggtggttttacgccacatccggcatggatataaaaatcttaggtactttggtacgaagatctgaaacatccagatcccgtcttttcgcttatataagtacgcttggcccttgattgacacgataatgatcctctattatcacgtaatcagttacctatgctgatcgcaatatcgttatctgtcagtaggttacagaagtggaatggatttttgttcgattcccttcgcccgctccaaactcaagtctcataatctcaatttcccttttgttaataacaagttacagctttatttttttgtattgttaagcctgacgttcgactcactgaatatcaaattatcgctgctaccaggtctgcctggccctgctggaaaacagcaggaagtcgcctcataaaatcctacctaatcagatgccggaatatcattgccgtcggcagaaacgttgaaaacttaaaaaagtcatgttggccctggaaaataaaacagatgcgcttacattgaaagagtcatcacattttgtgatgttatcattcaaacataaaatgtgatgatagtgacttttaagaccggtaattttgtgttcttgtgacatttgtcactttaaagatgttcatcattgttatagttctaacattgattatgctgatgattcagataaatcttattgacgcattctttggtttatcagctaaggatgaagattgttaggggaaaagatgaagtatcttattggtatcatgagttttttagtaattttcattcttgcaatccttgccagtaacaaccggggggctatacgctatcggccattggtcgtgatgttattctgtcaatttacgtttgccggtttgttgttgaaaacaagcgtgggtaaccaggtgatagccgttattgctggcgcgtttgcccatttaatggcctatgcgagtgaaggggttaactttgtctttggtggtttgcaaaaccatggcgagctctctttctttattagcgtcctcttgcctatagtttttgtgtccgctcttattggtattcttcaacatctgaagatactaggcttccttatccgttacatcggattgggactcagtaagattaatggcatggggcggcttgagtcgtataatgcggttgcttctgcagtattaggtcaatcagaagtatttatttcagttaagcaacaactgggacttctacctcaacatcgtctttatacgctgtgcacatctgcgatgtcgactgtgtcaatggccatagttggtgcttatatggcgatgttagaaccgcgctatgtagtcaccgctctggtgctgaacctgtttggcgggtttataattgcatcgctacttaacccttatcaggtcgaaccacaagaggatattcttaccgtatctgaaggccatcaaagtttctttgaaatgttaagtgagtatattttagatggttttaaggttgcgctcattgttggggcaatgttgattggatttattgcgttaatcactatgatgaacgccatatttaccgcaatatttggcatctcatttcaggcgcttctgggatatttatttgctcctatggcctacctggttggtgttccatggcatgaaacggtggatgcagggagtctgatggccaccaaaattgtaagtaatgaatttgtcgcgatgctgagcctgaaaagtatggctgctgaattctcagtacgtactatggctgtactttcggtattcctggtatcgtttgctaacttctcatctattggcatcatcgtaggtgctattaaggcgctgaataatgaacagggtaacagcgcggctcgttttggcttgaaattattatatggtgctacgttggtaagtttccttaatgcgaccattgttggcctgtttttctaaattcacaaagtaataatctaatagtatgtaatcattatgcctcaacgtttttaaatgttgggcccttactcagctttaataataaagaagcaatataagggattattgatatgttaaattgctgtttttttaataaacctctggctacgattttattaatgtctgcatcaatgtcaccgatatatgcagctgaagaatcgaggagtagaccaccaaatggtgtaactaactttatcacagacagtagcgctgatatttccttgagaaaccaattcaaaaaccttaactcctctgactatggtgaaaggtcagtgcaaacagcctgggggcaaggggtaacattagatttccgttcgggttatattgccgatattattggttttgacacatcgtattatcaagtttttaagttggccgcaagtgatgatttcgctgggcgcagcgtcttatacaatgataatgggaaagcaaagggatttcataaatttggccagttatatgctaaattgaaatttgacggtgaagatagttatttcagactgtattctggttggcagattatcaataaatggggagcgttgacgaattcgagtcgtgcgataccaagtacctatcaaggatggaagatggatagcgagtttggccgactcgcttttcgcggcgcatgggttgaccgatacagcgatcgtgattctcctgagcaggttcatttccagactgccgatcgtaagaaaaatataagttacctggctacaggagagctcagctataaacaaaaggattatagtgtgctttatttttatggcgaaagtcataactatatgcagcggcatggcgtggaagtcggttggcagcctcagtctttagctaagaatcagggccgagtacttaccatgttatatatgaaccatggtctcaaagatttcaaagcgatgagtgctgattatcgtccattcaataatgatgcatggcatgctgcattttacctggaatggaaacagcataagtggaaaaataagtttggtgcatcctggaccagggccaattcttcagacgatcaccttgggtattttgaacgacacatggcaaagaatagtcgcggaagattcaattctatggcggatgcatggggtaatgactacgtcggtaataatgaaaaatcggtgacatggacgacggaatataacttaacgccagaagtgaatatcgggttacaaagcgctattggatggggaatgaaataccactcccgaacaattgagcgtggtgagactattttgttctcaaggtggaaaccatcgtgggaaaagaatttaagtttccagttgtccggtggcccttcctggaattaccaaagtaaaaaaaatcgaccaattctaaccgacgatggtagaccaaagcgtgcagttaatcattctatcgaattccagattgattatgcatttaatctattctaattgctaacctgtttaaggataaatatccatgtataaatataaaatgattcgttcagcggctttcgttagcgctcttattttcagtgtgccagctttttgtgccaatccggtgtcatccgataccggtatcggcgcaacattgcagcagattaccgagcaatatcctgttcatttcatttctatagagcaaattgttaaagagttaaacaataagccgccgatggatgtcggttttgatattgatgatactatttattattctactcctgcatttatccatggtcagagagaattgtcacctaaaagtaatgaattcctgaagaaaagtgagttttgggatcgacttagtaacggttgggatagtttttccgtccccaaaaaatctgcatctgaattgattaaactgcatctggaacgtggagatcgtatttggtttgtcaccggtcgaccaaaacccactaacggaaaagagacggtgactgaactgttggggagagacttttccatcccgcatgaaaaacttaataaagttatttttgccggagaagataaaggggcaaaagtacaatatatccgtgaccgaaatatcaagttatattatggagattcagatggcgacattaaggatgctcgtgaagctggcgcagaacctattcgcgtgatgcgtgcactgaactcctctaatcagcctatgcctcgcaacggcgcgttagaagaaaaagtattggttaactctgactactgattgtttcattttcgcccccaccagcctgggtgggggtagcgaaaactgaggaatatatggcgcagggagtttgggcatctgattaaaggtaatatacttacctcaacacaaagcaggtgatttcatgaacaagaaaactgcatactttccccctgagttcaggctggaatgtgcatagctgattggtctaagagttactcttatcgacaggccactggggcaatgaatgtcggtcttatccctttcgaaacctggattagtcagctcagacggaagcggcaggatattttctttgaggtataaattaaggtttaacttacaaaatggtccgtgctacgacggggcatatcttatcggccacatccgtgctaccggacgaacaatacatcaggtcatccttaacccgacgcatatccagaaggtgattaatctgcgaagtgattcatcacgcaggcgaagcggggtgaaaagttatcgccaataagaaccgtttcctcattcagccgctttaacatatacagcttgtcggcatgttcgtaagcgtcgaagaagaggtaatcgacagcatctgttgcattatcatcgggggatttttcgcgtccctcgggggtgagcatgaaaacgccggcagtatgaccgagcggacgagcataccgaaagaacaattttcggtttacagcaaactcgccctcatcgcttttgagctttccttgcactgataatgaaaggtgcccggagttgtagctggtaatcagcatgattccgtggagttcctttttggtattctggatgtcgagtatcgacgtgaattccgaggagcaggaaaaactgatttcttgttttttagcattcccagtgataatcaaataggcgatagctgccagcccaataatgactattacgactgaccagagtaaaaaagagtgatcgctttcctgcttcatatcattcctcatgatggcgatactggctgatgcaatggtaatagccgaggttgaggccgcattcagcggcaaacgaccactcaaccaggttatggttgctcgcccaggtattaagatacaggtctttagggtgcgagcagttggggctaatccccacggacttgaaaatatccagcgctttcttttcggttatcgtgtctgtgagggcatttcctaatatatgtacacggcattgctcgtagtcgatggttcgcaagatagctgcgtccgtcatggctatatgattgggtatccatgttaaccacgctgttgccagtacggcgatgctggtaattaacgctgtgatagcgacaggccaccggtttggtttctttctcctcggcgtcgatgcaacataggcgactctggcggccgtttgcgcttcttcctgtagctgaatattgatattgacgtcgcccatccgaaatccaatacgaggaatggtaacgatgagttctgcaggatgacctgtcgacgtaatggctttgcgcaaaaatgaaatgtgctggttaagattcgcatccgtcgctctggcgccattatgctggaaaacattcagcagaatttcatcgcgcgaggatatctctttaccattttgcaacaaatagagcagtaattgtgtagccacgttattcaatgtggctatttcaccagatgccacgtcttttagggtatttttaagtggtctgaaaactaaaccatcaccaataattacggatttaattttgtttattggtatatgagaaatcactgatgtctcctttaaagcaggatatctcgcattcgagtgggggaagcaacagcataacataattcatttataaaaagaggttgtgccatagatcgctttattatcatttacataacaatattttaatattctttatgtaatcattcattctccttcctttctttcactatcttattgtcagcactcacttttggtatccctttcaatttttaaaaatattttataaatatattttgccagttatctgttctaaattaaaaaatagttgatagttaaaaactctataaaaactataaataatagacattaacactgtcggttgcgtgttttttggctaatttttaggtaaatgatcgatctgcaggcgggaaagcaacacgatttcctgagtttgattgattccgtattttggcattgtgtcaatttttcgtcgacttaatataagccccgaaacagcgtaaacgactgtggacggtatttctgatggaataccaatgaagttcaaaatacggtgcggttcgagatggattgtttgcaaggatatgcgctgccgccaccgcgagatcgggttttcccggacaggaattgtctgcggaaatagatcgtcggaataaccaaaaacagatataaggttaagagtaatatgaaaatgaaaaacgtggctgtggcctgtgcgctgatggcgggaatgacttttactgcatcttctgctttcgctgcaaaaaatgttgaaccgactaacggtaaaatccacttcaccggctctctcgttaattccgcatgtggtctggcgccagaatccagcccggtgcaggtaaattttggcgagatcccaacttctcagttaaaagacaaccaacgtgctggcgttaaacatgccaaaattgttctgcagggttgcgatacgactgtcgcaaaaaccgctaccgtgacttataccccggcaacgattgatgcagacaacaacgcgctagccgccttcacctctggtaccgccaagggcgcaggcatcggtatggttgacagcggcaaccaggatgttgagtggggtaaagctgcctctcaggtcaacattaccgatggtgaaaccgacattgatttcgtcgcttacctgcaggcaaacaacgcatctgcagcggtaactccgggtgatttcgaatctaccgttaatttccagatcgattatcagtaacgatctgcagcgggcgcattatcgcgcctgcttaacccttcctgcgaataactgaaaggaaatgcggttatgcctggatggcgtattttactgctttttatcttcatatcgcctgcatgggtttcggctgacactttccgtcttgtcagtacgcccggaaaaatgcgtatgcggggaaatattattgaggctgcttgttatgtcgatccgcgcgaccggtcgctactggttgaattcgatgatctctcagccagagatatttccggtaaacctgaaaaagtatctgcgcataatttcagcattcatttgctgggatgctcactaggggattctcaacaccccggtaatgtgtttcaacgcgccaatattactttttccggtgcacccgatagggacaatccagattatctgagcgtgcaatcggaaactgaaaatttagcgatagaaatatacgacagcaaaggacagcaaattcatctgggcgaaccatcaccggactatgtacttaacccaggaaaaaatacgctcaaatttacggcttatttgatctcccgcgacggaagaatgacatctggcgaatttactgcggtcacgcattttgttgtgaattatctctgagctgcactgcatttcgggtatctgaaggttgcgaacaaaaatgatcacgctgaaaacagataaaaaacgtctggcgctatttattgctctggtctgcgccgcttcatgggctgaagcggatgaggctattgaatttaataccgacgtactggatgccagcgacaggcataatgtcgatttacagcgtttttccgaaggcaactttgtggctcccggagaatatctgctggatgttcgaattaacagccaggagattcctcagcagacaatccgttatatcgccgatcctgctaactcacataaatctatggcgtgtctgacggcgcaacaacttgagttactggcgctcaaagaagaggcgctgacccatattcatgccattagcgcaacctgctatgacatttcccacctgccgggtgtggcgctgaataatagcgcaggcgtactggacattaccgtgcctcaggcatggatgaaatataccgacccagactggacgccgcctgagcgctgggataacggcgtcgccgggctgatttttgattacagcatttcagggcaggccacgcattacgaacagggtggcgatcactatcgctctctgtccggctatgggcagacaggttttaacctcggcgcatggcgttttcgtggccagtatcaggccaattacgcttcagatgataatcatgggcgtatcgactgggatcagatctatgcttatcgcccgttaccgatgcaggctgcaaaactgacggtcggcgaaatctatttgaattctcaggtttttgattcggtgcgcttcaccggggtcaacctcgccagcgatgagcgtatgctgccgccaaatttgcagggctacgcgcctgaagtgcacggtatcgcccgcagtaatgcgaaggtcaccgtcagtcagcagggccgtgttatctatcaaaccaccgtccctgcggggccgtttaatattcaggatctgcacggttcggtacgcggtacgttggatgtgcgcgtcgaagagcaggatggcagcgtacaaactttccaggtcaatacggctgatatcccttatctgacgcgtccgggttatgttcgctacaacgccgcggttggtaagccgtcgcgttataaccacgacgttcagggccctgcgttttatagcggcgatttttcctggggggtgagcaatgcatggtcactgtacggcggcgcgttgctcaccggcgagcgctacaacgcctagtcgatggggattggacgggatttaagctggctgggagcgctgtcggccgatgcgacgcaatccgtgagtcgggtgaagcatcaggctgaacaaaaaggcatgtcctttaagctcagctacgccaaaacctttgatgagtacaacagcgcgattacctttgccgggtaccgcttttcacagcgaacctttcgcaccttctcgcagtttctcgacgagcagtatgaaagtaacaacagcgccggcaacgaaaaagagatgtacaccgttaccggcaacaaaaccttttttgctgacgatccgcatttagcgaccacgttatacctcacctatacccaccagaactattgggatcgcggttcccaggatcgttacggattatcgatgggacacagtttttccttcgcgggaatccaggggatcagcgccaacctcgcggcttatcgctctgagtatcagggcaaacgggacgacagtctttcgctttcaatttcagtgccatggggcgatggccgctccatggattatgaattacagaacagcggtaaccagaccagccaaatggtttcgtattccgataaccgcgatcgtaataatccgtggcgtttgcgcgcaggggtttccggggaagggcgtacggcatttgatggttattaccagcatcgcagcatgatggcggagctggaatctaacgtcagctggcagcaatcacgctatttctccgtaggcggcacggtacgcggcggctttacggcgacgcgtcacggcgcggcgttacataacagtcaggcgtcaatgaataccgccagagtgatggttgataccgatggcgttgccaatgtgccgcttaacggcgaacaggcgcactcaaaccgtttcggtattgccgttgtaccggacgtcgtcagttatcacagctttgatacccgtatcgatgtggacgtcatggacgaggatatttccgcgaccaaagcgatcgtgactaacaccctgacggaaggcgccattggctaccagcgctttgccgtcgcgcaggggcaaaaaatgatggcgctgctgcgcctgaaggatggctcggtgccgccgtttggcgccgaagtgtttaacgccaacggcgtcagcgtcgccatggtgatggaaaacggcatggcctggattgcgggggtgaatccgtccgagcgtctttccgttgcctgggctggccgtgcgcagtgtcacttacaggtgccacaacaaatcaacccggaaggtaacgtgctgttgccttgtgaataatttcaataacctgaatgaattttgtcatgaataatcaatcttttaaattcgcgcgccgttggcttaaacccgtcgcctgtggcctgttttttattgcccagatcaatgcttcgtgggcgggtattgcgctcgaccgtacacgcatgattatcaccggtgatgctcgctcggtaagtgcgaacttaaccaacaccagtccgagcattccatttctggctcagtcgtgggtagaggacgcccacggaacaaaaattacctcgccattaatggtcttaccgccgctgcaacggattaacggtgggcagaagggaatcgcccgtgtgacgaaaaccagcggaattaacgcgttgccacaggatcgcgagagtctgttctacctgaacgtgcgtgaaattccgccaaaaccggataagccgaacgtgctgcagctggcgatgcagtcgcggatcaaattgttctatcggccgacagctatcgtgccggaaacgccgggggcggtgtggcaaaaccaactgatctttcacaagcagggtcagcgctggaccgtggataacccaacgccatacttcgtcaccttaatcggctttagccgcaaacctgaagcccagggcggcggcagactgactgatttcccggggattatgatcccgccaaaatcctctctcgatttcaacgtctcggacgccagcgtcagccagttcagcatgatgtacgtgaacgattttggcggtcaccccgaattgaaattcagctgcacaggcaatgtgtgtaaagcattgccgatggagcaacagccccggtaaaggactcgtaaatgaaaaagatgctttgcgctctgctgatggcaggcatggtctgctcggttcaggccacaagcgggcgccatgatatgagcaacgtttccggcgagtatggcaacgtccgctttcacggtcgggtattcgtttcgccgtgcgtgctggatatggcttcacgcgatcagactatcgatctcggtgatatttccgccagccgctttcgccagagtggcgatcgcagcgatccggtattggtgacgctgcacctgaatggctgcttaaaaggctccgggcacacgttaaaggacttccctgggcagaccagcgagctccctgagctgtcgcacagtacggtggagcgtggcgtttcgatgacactgatggccgaaagtgcgccggaaaacagcgatcttgggcggattcgcggcgatgtgcgcggcgcgggcattcggctactgaccgaacgcaaccagttgatccacctgaatcaaccgcaacgcatgtggatcctcaagccgggcgataacgcgattcactttcttgccgcgctggaatcttttgggcaggaggtgaccgctggcgaatttaacggtctggtcagacttaagctggagtatctatgagcgtattgcacaaagcgctgctgtgggtcgtcctggctggctgtccgctggccgggcaggcatttactctcggtgagggagaacctcagggcggatcgccgcatcagtacgatattgaactgaactcactggatgtcagcaaaaaccacgagggcggcagaacggatccgttcacctggaatttaggcagttggtatgtcgtggattttcattgtgagcaggccgacatctcgcgccagccgatttactacaccaccacgaccaccatgccgccctctaatcagggagcgaaccgttttcgtctgaatgattacctggatgtggaagtgaaggtatgggtcgccgggcggtataacgactacgttcaggcgccgttcaccaacttttcgaatcgctacaacgaccataactgcaaaaagcgcaaaggctacgagcgagccactaacattgaaagtggctctaaagggaaagtgacgtttattgtcactaaacccattattaacggcatcaatatcacttctcagtcgctggtggaggtcgctggacgtctgggcagcgctggccctacgccgacaacgccaatttcccgtgtggtcattaaatccgggctcattacggtgccggacaaatgtatctttaatcggggagacaaaatcagcatcgaatttggtgatttgccaggctccgccgcccggctcaacggcaccaactacagcaagtcgatccccattcatgtggtctgcgagggggggagcttcgatcagggcgcgttgaacattaatcttggcgtacaaactaccacggcgtcaggcacggcgggatttaacgatcatctcctcggcacgctaagcggcggccaaaaacgcgacgatctcggcattgtgattaaagacgcgagcggcggcaccgtcgtgcccaatcagttctacaacgtgaagggtttttaccagaatcagggcgactggaatcttaccgccgcgccggtggccaaaccgggcgtgggaagcgtcaaagaaggtgagtttgaagcctctgccaccgttgtcgcgcagtttcagtagggggatgccatgagatttacgctgttaatcgccaccagcgcgctactgcttggcggcttggcgcaggccgacactaagctggtcggcggcgatatgtattttcacggcaccattcgagcgctggcctgcagccttgcgccaggaggcgacaaaatcgaggtcgatttcgggcaaatcgcgacccaggatctctatctctcggggcgtagtaagccgaaaaaattcagcattgagttacgcgactgcaacccggaggtttttcgcgggatctcggtcactttcagcggaagtgaagatgcggagctggcggatcatctggcgctggatagcagtgaacaaggcgcctccggaatcggcatcggaatgagtgaagaggatggtacggcaattcgccttgatgaaagcacgtcagtcaaagagattactgaaggctcgatgacactgaactttttggcatgggtcgcggcggaaccgtcggcgttaaaaaatcagactctcgaatacggccccttcagcgccagcgggacctggacgctgaactaccagtagcatgatgaacgcattgcatcgtattgcgccgctgccggcgcagaaagtattgctcgttgtcagtctgtttttctggggtggggcaatgcatctctactggccgaataacgggggtagcggtttgtcgttgccgctaaatataacggcctggatttatgccgttgtgctggcagctagcgcattgatgctggtacctcgtcaacgttggcggataactatacccgccgcggggtttacgatgggggcgctcattctgacgttgctttgtctgttgacgcctgaggtttggcggtccgaggcgctgctggtcgcgggggcgttgctgggaggcgtgcttgtctatttggcgacgttgcaaattccgcttacgacaaacacgctgacagtactgctggctctgctctggggcgcgtgcgtcctcgaatgtctggcgtttacctatcaatactggcattggccgggggtgaattactgggagtttgcctggcggcgcggtacacgcccctacggtatttttcagcaggttaatctgatggccagcttcacggcgtgtggcgtgctgctgtcagcattgctttttttacggctacgtggcggatatcggattatcatcgggattgctctggtgataatgggatttgtactgcatgagtctcagtcgcaaaccggttacctgtctgtggcagtaggcgaggtcttgctgctggcggtttttcctgcgcagcgccgtacgctgctgttactcctgctgccgctggcgataggcatgatagcgggcgcacttgctcgccatttcttgtcggtggtgacgattaatcacctgacgacctcccaggtgcgctggacggtgttgaaagcatcgctggcattatttgccgaacgtccgtggaccggatggggcgtgggcagtttcgccgccgtgtttcttgaacgcgcggggccgttggggctgagcagcatctcgcatccacataacgaactggcgctgtggctggtggagggcggtctgattggactgctgggggcgctttgttttatggcgagtggtttatggctctggctgtacggcaatcgctggcatcgcgcctgcctggtggcggcgctacccgtggttatccatatgttgacggaataccccgtcaggcagtcaacgccacattggctactgctgattttgttgcttcgttgcgcagactgccggcgaaaaggggcccggctgccgctcaccctggcgtcgctgttgcgcgctgtggcattgatcgcggttgctgtcatcactccattgttgtttctcacgctgcatacgcaacagcaactgacgctggcggagcgacaatcaacacagtggcgtctggccgaatctctccctgtgggaggctggctgcttgccactcgctaccggtttgatgtccagatggggtatctacaacgatatcaacatacccgtgatgagcgctggctggcagccgttcgccgctgggcgcctgactatgtgcgtgttcaaccggacccgaatgtctccttcacgcagatcttgctggcgttacagcagcgagacctggccgaggcgcatcgtctggcgacacgcttttgtctgttatacccgaatgatagacgtattccatggctgcaggatgcgcgacgtccttttaatcaaataatggagtgagataaacatatcctcgtatcggcctgcgttcatcactgagacagaacgacctgcgcgagccgatcggtgatgttatcaagcgtgcaaatcttaatacgatggtcccgtgaatcagagaggataaccgtttctccgtcgccttcgatttcaagaataaatctcgcccccaggcgtctggaatttttatagcgggtgctgattcgttggggagagcagtcgttgatgatgcttaaatagggaaattgctgacgcaggctacgcccgagcagcactgccttagcagccacgcgaggctggcctgcaataatcacaatgtcggtcggcggatgcgctctggcgggttggggacgataaccgagcagagtgacaatcggctccatcatgaatgcaaaaccgcaggcggaaaccggtttttcagcaatacggctggcgcaggcgtcgtatcggccgccacggctgatgattaactcgcgctccatggcaatgctgcgccattcaaagaccaactgacaatagtcattggcgggaaacagcgcaggatcgtattgccaggcaataccggcttgggtcagggcgtgctgaagtcgctggaatcgatgacgggagtcaacggtaataaaatccgccaggcagggcgcagcaggagcaagacgctgaagaaggatatcctcatgatggatcaaccactccggatgtttctccagccagtgctgctgctccgggttcagcaaacgcgagatgggctggtagtaatcgcgcaacgcccggcggaaagccgccagcgaggcctcgtcacccagcatattaatatgcagttccgccatttcaccgaggccaatacgcctgaagaaaaccgcctgcataaccagatgctcaagttcgatatcaacccccggcatgccaaaggcttcgacgccaatttgatgattttgccggatatctccatccagggagcgttgacggaacatggcgcccgaataccaaatccggctcattactgcggtatgagggttatcggccatcaggcgcagacatccggttgtcccatcgccacgtaattttcccttgtcggccatcaccgggccgcctggggcgaatagcgatgtatgttcaagtaagggtaacctgatttgttgatagccatgctggcgcagaaactgttcagcctgaagttccagccaggtccactgttctgatggagaggattcatatttacgcgggcggccgcaatgtcgtgcccgcagcggcctttccatctgggcttcaagttgctggctcaacgctggcgaggcgagcaggcaattttgcgccagcgcatggcgaatcctggtcaccagcgcccgatttaccggttgccggcagaattcctggaagtgggcctgtcgctgttgctcattctcaccgagcttgagccagacaggatgggggactatcaaacctgaaggctgattaccgtgactatggcaccccgggctcccgtcctcgtcacattcaataaagcgcttcacggccaggaaataggtttctggttccaggggactgcataagtagcggctgtcccacaatgcgccatgccgttggtaacgacgattgtaataaggcacatagctgcgtccgatatgctgaataaaacggctcagcgcctgtttatccggagcgctgaccagcagcaggatacgtgggacggcaagtgaccaactatgaatagacacggcgtaacgttgcgccgcgtcttgcatacaccgttcgaaggcagagtaatcctcctcgtggcggaataactcctcgccattatgcccgcgaagctgcgccagatgcggcatccccggaataaataatctgttttttctcggcatgtccacggttctctgcttaaggatctcgctgtgtgtcagggtgaaatgctgaaggcgggattagcgccgggacgagtaccgtcctgccgcacggtacccaatctggacgtgtttactggcagtgctgttgcagccagtcaatgagcgctttctcttcaagcgtcatttgacgggagctggcgaggtcccacagccgtatctcattgtcggtattcagcgtgattatcgcgcgacactgactttgcagggcggtctgatgctggcgtttaagtttgttgccgctgcaatccaccatcacgcttaacttttcaatacgttggcgcagtagctccgccagcatctgggcccgcaggccatcatcctgacattcactggtaatgaccacgtcagggtgaaaatgccacaacggattatctttctggctgacggtctgaatcagtaacagcaggcgctcgataccgatggcaaaaccgcaggccggcaacgccttcggattgaataactccgccaggccgtcgtagcggccgccaccgcagacggtaccctgcgagcccagttcgtcagtcacccactcaaacacggtgcgggtgtagtaatccagcccgcgcaccagacgcggattgatggtgtaggggatgtcggccttatcgagcagttcgcagagcagcgaaaaatggtgacgggagtcttcgaacaggtaatccagcaatcgcggcgcctgttccagcatgggctgcatggtcggatttttgctgtcgaggatgcgcaatgggttggtttccagccgtttgaggctatcttcatccagttgctcacgatgagcattaaaccagtcaacaagggcggctttatgggcccgccgttcatccggcgtgcccagagaattaatttccagcctgacatgcggggtcaggcccagctcctggaacaaatcacggaccataaaaatcatttcagcatcgacgtccggcccggccatgccgaaggcttcagcaccgaactgcgtgaactgacgcagtcgtcccttctgcgggcgttcatagcgaaacatcgggccctgataccacaggcgctgggttttgttgtaacacagattattttccagtaccgcacgcatacagccgctggtcccctcgggccgcagcgtaatctgttcgccgcttttatccgtaaagttgtacatttctttggcaacgatatctgtggcttcgccaacagcacgttcgaataaggcgaccggttccagcaggggtaagcggatctcctggtaaccataacggtaggtcagacgccggaatttattttcaagccactgccagattggcgtttcggcgggcagtacgtcgcgcataccacgtatggcttttaactttgcactcatcgtttatgactcctgatgcgaaattcccatatactgtgcaggtctggtgggttccggttggcgctgcaacccaccagattgtccagcgggcagcggcagtttgccgctgctcactcttatgccgcccgttgcgccaggtcggcaatcacgtcatcgatcagcgcatcaatccgggaactgtccaggtggtgagcggtggtgatcagatgggccacgttgccggacgttgccaggcagtgtttcttccatacccattcagaaggcttcggaaagaccaccgtgatggagtttttgtggcacagcgcgtcaatacctgctgctttaaagcgatccacggcgtatttcgccatgttgaggctgtgaccaatgcggcgatgccattcggcatcggtatggctgcgaacggcggcccacatcatcaaaggggtatgaccgttgcgtgaccctgaaatcgttttatcgtgggcggagatgtagtcgatctctacgctgatacggtcgacgttggctttcttggctaccacaatgccgcatggaatcggagagccgatcattttgtgtccggaaacgccaatcgaatcgataccatccgcgaaggtaaacggttgtggatcctccacgaaaggcaagatcatgccgcttagcgcggcatccgcgtgtagataataatcttcacgtgggatccccagcgcagcgatacgtttctgtatctcagcgatattatcaacagcgccgcgtaccgttgtgccaatattggcgaaaatgatgggatggcgttcgcctgaggtcctgattttattgatcaaatcgtcataatccatttctccgtctggctgagactccaccagttgcgatttgatacgcagcagtttgacgattttggcgacggaatagtgagtatcttttgaatagtagagcgtgccttccgggaacagctctctgcccagatagcaaccaaacatattactttctgtgccgccgttggtgacatagccccagctttccgcaaaggggattttgaatatgccggagaaatactccatgacttctttttcaaagtcgaaagagttgagtaaatagttacagtactccccccagtcaccacagttattaattgagaaacgcagaaaacgctccagcatggtgtaatcaaaatcagcagattcagggtagccaatattaaagtagcgatttttcacacagtatgaccaaaatgcatcgagtttattttgatcggcaatagataaagacatatgaatctccatatttatgttggtgaataaaatattatttttgaaggtaaagaatatcctggccttttttattacgtccggccgcgacaaaagaaaacagaggaatggttaccattatcataattgtgccccagaaaatggaatcggtacctgaaccgagcagggcgaatatactgtaaatcataccgatgacagtcaggacgcaataaaacataaaaccacgtccacggttgagctttttagaaaccatgatgataggtagcgcgataatggcatacatataaggcagcagggaggcaaataccgacatcagaatcaccacctggaactgtttggcgagatcgggggaagccgtcagtaacagcaccagactcatcagcacgccggaaataatcagacctttcatcgggacatcatttttattggtctcggcgaaaatctgcggaaataacccctgtttcgccccggcccgcggcccttctgactgtagaatcaaccagccggaaatggagccaaaacaggcgataatactcagcgcggaggcgatgttgccggccatatcgccaaacatatagcgtgccgcatcggcgaatggggcggcagatttgaccagttcggcgtggggaactaggcccatgataacggtacagctaccgacgtaacatacggaggcaatcagcagaccatatacggttgcgcgaggtaccgtgcgttcaggattttccacctgtccgctggaaaccacggcggattccacccctaagaaaccccacagcgcaatggaggccgcggagacaatcgctgagctgtcgctgttgcccgtcccgttgtagacttcagagaacattttcgggtcaaaccagaaccagccgacaatgcccacacccagcacgacgaccagcatgcaactggcggtgaaggactgcgcgcgcccggccgttttagcccccaggctgcctaaagcaataaatgcccacagaatagcgatagcggtgatacaaccgtaaaccggattatgaagcgccgggaagaagtaactcagatagccgaccccggcgacgaggagcgcgacgttgccaatccaggcgctaatccagtagcaaatcgtcgtttgaaaaccgatgaaagggccaaacgcatcgctggcataggccacgatccctcccgcgcgaggggtaatgaggctggttttagcgaaaaccaacgccaacgcaattacgccaataatagtaaacaaccatccccatagtgaaatatatcccactccggcgagattggtcggcaacataaaaacaccggaacccatcatatttgatgcggtcacaagggttagtgccgttaaccccattttttgcgcagtacccgcgctgacgcttcccatatatatcccctctgtattaagtaaatgcttacttggttattaaacgcattttttcacagggcaggggggggaatatgatctacatcattttttgaaaatgatgtgagcgaatacatattaatttcggtatattttttaaacagtgattaggtaattcactccgtccccttttttatttaatcatcaaggttagtggtgattgtgtaataaataacgggagggctaatttttataggcgagcgctacagtgagtggctgctgatttttcggatgcaaaaaataaggggcaaaagccccttatttttacttcaacgtacctaattattaagtttcaccgctctacaggtggtttactggaccggctggtacttttcgccatgctggcaaacacgccgtcgcggaatatccatgcgtgcactaatgccgcagagagatgtagcaacaccaccgcaaagagcagtttagctagcaggcgatgggcatcgtgaaaccaggcaaaaagcagcgggctggtcggggtaatggccggaaggttaagtccttcaaacataacaatcggaacgcccgctgccgacagttgcgcccagccaagcaatggcattgccagcatcagcgcgtatagcgcccagtgtgacgcttttgccgctagtacctgccggcgtgagagctccgcaggaagaggtggctgccggctataaaaccggttggccaggcggatgagcgccagcagcaaaatagcgatccccaatggccggtgtacatccaccaaccaaatgcgatggtgtaatgaagtcatcatagcggcgccgatgaacagcatggtcaggatcatgattgccatcagccaatgcagatatctcgccagagggttgaaatgctgcggcgcgcgcgcttgcttgtgatgattagagttcatttaacctccgttttttgcacggcttcggttgctttgccatagccaatttcccgttcgcgacggctccaggaatgcgaataggcgccagagcgcgcatttaagacgggatcgttagagacctctactccagcaggcacgatggagggatcaaagttaacgtcacggcaggcgccttcggcttgggcgacaagttgggtgactttgagcgtaccggcgacgacctgctggcgatcgtttggccatggctgcgaagggtcatccaccgcgtcgccagcttgggcgagttgcaataccaaatcccagtaaataggatgctgagaaagtcgctgctgtaattgttcgaacaggaagttatggtcggctttctgtcgctgttcatcagcgatagagacaaatggatcgtgtggccgcatcatccagcgtacgggctggcgctggaggtcggcgttcacgagatagaaagcgttaatactataaaatgtcgccccggcaaagccgcctggcgctggcttttgcgccgcccactttaaatatttaccggcttccgggtagtcctgtaaaaatgccgcgagacgctgcggatcgggcttaccggtggccgggtcgacggcggtagccttcttcatggcaagaaagccctccggggttcgggtggcgaagtagggctcgttgttcattgccatgcgccactgctgtttatcgtccgttttcagtagcagcgccatgctcagggttttcgttgaattatcagccgcgtgtggattacctgcgccaatggagaatcgcccgacaacgggggtttccgactgtgaaaagagccgcgcggtggaataagaaacggctggagcggctggctcgaacgtcccgctaaaacagatccctttgccgtgtgcccggcgaaacccggcaggaaacggcttgtctggatcggggactaatgactggctggtggttcgcgaacccagccaaccagaggtccaggcgaatgccgccgccgttgccccgacgatgaccgcgatcgacgccagcgcgcgccaggtatttggggatcggaaatccagttttgacatagacgtttccatcgttaagttttatttcacgtcacgcgtgatatatcgcacgcaacacgtttaatatcgtgagaatatagggggtgttgatatctgaatgctgcctttatatctttttgtgctgcaaagatattgcttctggaaattattgtttataataaaatcattgtgatttagttggttacgttttttctttaaccgctttttaatttcttcattaagtatcatgataataattataattggtgcgcgaacgaaagaaacaatatcacgaaaagtttatacttctgttcagttaacgtgataataaaaaatgtcattatctgcgctggttggccggcattaccaacccgattcagggtatagtgaaagcacgagtgatctcgggatacattgccttcagcgtgacgagggtaatgtgttgagcgaaacctctatgcctgatggatttcactgaaaaatcaaagcgatgaatgataaaaaatggattaaagcagaagacgtggcgaaactcgccggcgtttcccgttcagccgtctcccgcgctttcacgcctggggcctcggtgtcgccgaaaacccgcgccaaagtgcaggccgccgcggaaaccctgggctaccaggttaatatcatcgcccgtacgatgaacaccggcagcagcaactttatcggcatcatcacttcagggttcgataacccttttcgcagtaagctgctggcgccgctgatccaccagctggcgctgcatggatttatgccattgttgatgaacgccgatgatccgcagcagttagctccttcgctaaaacatcttctcagctatcacgtcgctggcgtcattatcacctccggcgcgccgccgctggagctggctgaggagtatcttgcgcgaaaaattcccgttacgcttatcaaccgtcatgctgaacttcccggttgcgaccgcgtcagcagcgataacgcgctcggcgggaaactggccgctgagctgttacacgcaggccagtgccgggacgtcggttttattggcgaaaatcgtgacaatttcagcacccggcagcgctacgaggggtttattcaccatgccagcgggctggctgtcacggcgcatttctgcgaaacgggcggttatcagtccggttttgcggccgctcgccggctcgccgcggaaaggccaggattgcaggcgctgttttgcgctaccgatatgctggcgattggggcgatggatgggctacgagcggataatccagcggccgtccttccggcaattattggcttcgacgatattccccaggcggagtggcaaccctatcaacttaccactatccagcaggacaccacgctgttggcttatcacgcggtggagatgctggttagccggatcgccaaattcaatcaaccttcacgtcaccgagaagtcgctgtgaaattaataattcgtaatagcgctaaatgaaaaattcattttatgatgaatcgatcacagaattatcgctaaaatccatccacactcactgcgctcttcggggcttttttaaataaaattgcacacgtgtgcaaaaggagtaaatgatgacatcactggattcctctgcgctacagacccgctatcgcctggcctgcgagctggcgaaagcgggtgccgagctggctttcgaatactatcagcagcgcgaggcgctggcggtagagcataagggcaatgaccttcaggacgtggtgagcgtggccgataaacgcgtagaagcctttgttaagcagcgcattactgatgcgtttgcggaggatggttttctcggcgaagagagcggtacgcagatgccggacgccagggtgctatgggtggttgatcccattgatggcaccagctgttttttgaatgggctgcatacctggtgcttgtcgctggcgatcgtcgttgacggcgagccggtggttggcgtcgtctacgatcccaaccatcgtgagctgttccacgcgctacggggccatggcgcctggctcaatgagacgccaattcgcccacatcccgcagcaacggtcaaagaaggggtgatgggcgtcggaacgtcgcatcgggtgacgccggcgcaattcctgccttttcttgacgcgctgctcagcgatggcggcatgttcatccgcaatggctccggcgcgttgatgagcgcatgggcggccgccgggcgcctgattggctactatgaaccgcacatgaacccgtgggatgccttacccggtctggtgttgatgcgcgaagcggggggcgtcgccaacgactttctggcgcaagaggggattcgccatggtaaccccctcctgctggccagccaaacgctgtatccccaactcaaaaatatgattcttcaaccattaaattaacccttacaggttcgggctgtttctgattatgtaccctacacagtaacgataacgaccctcacggacgaagcacatcaatcagtcaagcctccgaccgtcggagaaactattatgtctggaattattcattttttccgggcgtcgccgccgcaagcgggcgccgcgtttgatgaaaaacgttttcgccgggtgcgttggcaaacgtttattgctatgaccctggcctacgtgacgttctacgtctgccgcttatcgttcaccgtggcgaaaagcgcgttggtggaattaggcattaccccaacggagttgggaatgattggctcgacgctattctttagctacgccatcggcaaactggttaacggttttatcgccgatcatgccaacgtggtgcgttacatgagccttgggctattgctcagcgccgggatgaacctgctgatgggcatgaccaccaatgccatgctgctggctatcttttgggggattaacggctgggcgcagtcgatgggcgtcggtccttgtgcggtttcgctggcgcgctggtacggctttaaagagcggggaacgttttacgccatctggtcgacggcgcataacatcggcgaggccatgacctacatggtgatcgccgcggtgatcgcgggttttggctggcaaatgggttacctctccacggctgcgctcggcgccgctggcgtggtgctgttgctgctgtttatgcgcgattcgccacagagcagcggctttccctccattaacgtgattcgtgatgaaccgcaggaagagactgaagcgcggggatcggtgttcaaaaaccaactgctggcattgcgtaacccggcgctgtggacgctggcgctggcatcggcatttatgtatatcgaccgttatgcggtgaactcgtgggggatcttctttctggagcaggataaagcctattccacccttgaggcttcaggcatcatcggcgttaatgcgatcgccggtatcgccgggaccatcatcgccggcatgctctctgaccgctttttcccgcgcaatcgcagcgtcatggccgggtttatcagcctgctgaacaccgcgggtttcgccttaatgctctggtcgccgcataattactacaccgacatcctggcgatgatcgtcttcggcgcgaccatcggcgcgttaacctgtttccttggaggattgatcgccgtcgatatctcttcacgcaaagcggcgggggcagcgctgggaaccattggtattgccagctatgccggggcggggttgggcgaatttctgaccgggatcattatcgataaaaccgcgatcctcgaaaacgggaaaacgttttatgatttcagcacgctggcgttgttctggataggcaccggattgggttccgcgttactctgttttaccaccgccgccatcgtcgcccgacgccatgccgtcgaacggcagacttcattctcctcataactgattaatcgataaggaagattttatgatgcctgcaagacatcagggccttttacgcctgtttatcgcctgtgcgctgccgctgctggcgatgcaatccgccgtcgcggcgaactggcaactggaaaaagtggtggagttaagccgccacggcattcgtccgccaacgcccggcaatcgtgaagctattgaagccgcgacccagcgtccatggaccgaatggaccacccacgatggggagctgaccggacatggctatgcggcggtcgccaataaagggcgcgcggaagggcagcattatcgccagcttggcctgctgcaggggcagtgtcccagcgcggaggatatttatgttcgtgccagcccgctacagcgtacccgggcaaccgcacaggcgctggtagatggggcattccccggctgcggcgtggcgattcattatgtcagcggcgatgccgatccgctgttccagaccgacaagtttagcgcgacgcaaaccgaccctgcccgccaattggcggaagtgaaggcgaaagccggcgatctggctaagcgtcggcaggcgctggcgccgacgatccagttattaaaagccgcggtttgccaacaggataaaccgtgccccatttttgataagccctggcaggtggagcaaaaccaaagcggtaaaaccaccataagcgggctgagcgtgatggccaatatggttgaaacgctgcgtctgggctggagtgaaaacctgcccttaagccaattggcgtgggggaagattacccacgccagccagattacagccattctgccgctgttaacggcaaactacgatctcagtaatgacgtgctgtacaccgcgcaaaagcgcggctcggtgctgctcaacgcgatgctggacggggtgaaagcggacgccacacctaacgtacgctggctgctgctggtggctcatgacaccaatatcgcgatggtgcgcacgctgatgaattttagctggcaactgcccggttacagccggggcaatattccgccgggcagcagtctggtgatagagcgctggcgcaacagcaaaaatggcgaacgttatctgcgcgtctatttccaggcgcaaagcctggacgacctgcgacgcctgcagatgccggatcaacagcacccgatgctgcaacaggagtggcgtcagcctgattgccagcagaccagcgtgggcacgttatgcccgtatcagtccgcgctggaggccttaagtaaacagatcgataaaagcgcagtaccgccggtgaatatggttctttaatcagcgcaaacgccataatcctgagtggaaataggacggattatggcgtattgcttaaagcgttagtgattcgagtaataattccagagatattggtttaatggacgcatggcactaatttactgagaggaaaaataagcaagcctcctctgagttttgttacgtctttatgtaatatgccttggtttttgggagtttttaggaaaacatttaggtgcgctaagattgttcacaactcaggagttggttaccatttaacttctcaaggtaacgctatgtaatagcatagatattttctttaaataataggggtgcattttaatacttcaattaataacgtattgaagagcttggtaatggtcatgtttattggtgggctagatttagtaggtgtggtattggttttgttggattttatgccaccattttcttgggagtaagttaaagctaaaaaaggatttatgcaatggttgaatattattttggccatgatggcctccacaatatctctccttttgatagaccagcaacatggggagggccaggtccagttgattttaattttcatgatctagcaaaacaattggactgttcgcggaatttcaatcgagttggtattatttattctaatggtgtgagccaatggttggtaagaccttcccggcggattgccaattcggtccaaagcatagcaagtcatgttattgtcacaaaggtttgcgatatctcacaagaaagttccacaaaagctattgttaagacacttcaggcaccatcactggccaccgaaattacatcaacggcactttcatgcggagcggctgcaatcacattagcccttactcttactggaacggcgatacttccccttacggcaggagcatcggtgctggtagccggagttattgctgccagcggcgtagctaccgttgggcaatgttttatcggtgcgggaaggttatggacaataagcagaggtagggaagagcgtttagcatggcttgattcgcaggattggtatcttactacgactactatccttgatatcatttctcttgcaggtgccggggctgggttagcgaaatctatcgaagtgtggaaaacgatgaaaaaaatatcttcagcagaagctttatcatggctaagaggcctaagtagggttgagcgtaagcggcttacttatgaaatcattcgtaatgaaaatccgggaatatctaactctggtataaaagctgctatagaaatggggcattatcctaaacgatttccatctgaagtattacaacgaactctacaaagggagttgatgcaagtgattgttaattcatcagcatttgcagggagcggcatttccggaactgttagaaatccacataatctaaaaaaaaacaggacaatatgtgatagggataatacaatccttttcattaacataaaatctggttggcataatgattgagcatataaaaaacagccttgtgttaaatattgatgtggaaaaaaatcttgcgtcaatgagtccccgacaacttgagatggttaagcagcgattgaccgaatatgtaggagcaagagtcgggggacatacgctcagtattccaatggtgggcggaatactatttgctgttttttgctttgttatgccgcaaattaccgtgtgggaaattattttcaggcttaatggatggcctgattatgctatactggctgcggcttttccctcgggagttttgtatagcatattgatttgtattccggcgtttcttactgcacgaggccgattgataggtctgaaatctcttttatgtgtcattactgggacaggaatcattgcaatagcatttttattattcgctgttattactttcattatggggggaggtaatgatgcgggcgatctcctcggtgctattttaggagtgttttttatcgcgatcggcatcaaatgcctcaatacggttatgttcactaaaacaatcgcattttacttactaaatcgggtctcccgccagcaaataaaattgaaacactcgtctggttaagattttgggtgtcaatgattgttcatacttctgcgttagttactatttgagtattcaatgcgtgacgatatcgtagtctggatattgactttaagatcgcgctgtcattatgtacagctattagattaactcggtgcggaaagtgattatattactaaccttaattgatcgccaggaaatgaaatgcgcataagatttttctgtttattaacttcttttttcatcgttctcttcccgttgggtgggctgttagattatttatcccggactagcaacgatttcttgaacagcaccggtttgggttttgccgatggggatgccgacccctctttcttgtgggttttgctgacgttgatgatgattgtgaccgtggggttgaactatctcatccgtaagattgtgccaggaaatagagtatgaaatttatgtgaagttattaaacaacggacctttgctggcccgttatttatccacatcattcccttttcttcagctattcaccttcatcgccataatagagcttgccgatcttaattagcggtcggccctgggatttacggtgcagattgctatcgcgcagcgagtagacgcagccgcagtactcctgctggtaaaagcgctcgcgcttgctgatatcgatcatccgcgaggatccaccctgtttacgccagttataatcccagtagaccatgcctggataatgcccggcggcgcgctcgccgcagtcgttgatttgctgcatgttcttccagcgtgaaattcccagcgaactgctgataacgctaaagccgtgctcgtaggcatagagcgcggtgcgttcgaagcgcatatcaaagcacatcgtgcagcgcacgccgcgctcgggttcccattccatcccccttgcccgcgcgaaccagttatcggtgtcataatcggcatcgataaacggcacaccgtgtttgtgcgcaaaacgaatattctcttccttgcggatttcatactctttctgcgggtgaatgttggggttatagaagaaaatggtgtagtcgataccggaagcctgaatcgcctccatcacttccccggagcagggagcgcagcaggagtggagcagcagtttatcggctccgttgggcaacgtcagctgtgggcgctggaactcggacatcaagtcattcctgaagtaaatacatccagcgccaactgtagcatgttgaagggctgctatccttccccagaaatgtcaggccgcgcaacctcacgcggcgctgaattcatctcaaattaacctctcacgccgagatagccgtggatcgccatatagatccccaccgcgccgattagcacgctggaaaagtagggggcccgacgggcgagagtattaaaaccactccagcgtttggccacctggcgaacgcttaccgccgcgccaacgccgacggtgaccagcgtcagcgcgaggccgatgctgaaagagaggaccagcgtcgcacctaaggtcagggctttgagctggatgcagataagcagtacggtgatcgccgccgggcagggaatcaatccgccggtcaggccgaacagtaagatctgccagttggtgacctcccggccgtcgaagcgacgttgaatatcgttcgcatgtgcccgctcgtgggcgtcctgataggcctgacttccttcctcaaggccgtccagttcatgatgatgatgttcatgaaacgccagatcataatcgtgggtatggcgctggtggccgagcgtcagacgtacgttaaagtcatgcggttccgggatggtctgcgcggattctaaataatcgcctttatcaacaaaagagaacatctgcgcgaagctgctcccgctgcgccgtgtcgccagtgagacatcgccagcggcccatcggttgccacttagcgtgcgtatgcgccagcgcggcggttctccttcttcgaagatggaaagggcgatttgaccgtggccggtgtcgacgatttgcgtttcatcatcatgatgatgcgcatcccgatcctgcatggcctgcagccagttacgttcaccgcgccaggtgcgccagaacatccatattgcggtaccgagaatgatgaacgcggaaaccagctgtagccagggttcagccgcttcggcggtaaatttctggctaaaatacatgccgccaaaggcgatcagccagacgatggcggtatgcgaaagggtcgcggcgaggcccagcatcaccgcctgacgtaccgtgcctttaatggcgatgatgaacgccgccatcatggtctttgaatggcccggttccagaccatgtagcgcgcctaacagaatggcgctgggaatgaaaaaccaggcattgccttgctgaagtaaaggtaagaattcgttcataagaagagagttggttgtcgttggtgaatgggattctactcccccccagtataagatactaccccccagtagattacaaacctataattgaggcattgagttcgccagtgaggttaacgtgtcgcatacgattcgggataaaaagaagctgcaggccagagccagcaagattgaggggcaggtgagcgcgctgaaaaagatgctggatgagccgcacgaatgcgccgccgtgctgcagcaaattgccgctattcgcggagcggtaaacgggctaatgcgtgaagtgatcaagggccatctgacggaacatatcgttcatgaaggcgatgaagtgaaacgtgaagaggatttggacgtggtgctgaaggtgctggattcctatatcaaatagcggccacggatagcgccggcggcgacagacgcgccgccggcttcagcattagctgtgtttgtttttcatctcaaaacgcggtgataccaggccgtacagcgtccagcccataaaggtcacgatcgcgccgtagagcatcgcctcttcgccggaggagtacagcgcatagaagctgtacaccgcgccgataaaggcaatcacgttggtggatcgcgctttgcccggttccacattggccattttctggataatcgccagcgccgccatcgacagaatgtacgggatgatgttagtcaccaccgccaggttaaccagcacgttgaactggttgctcaacgacgggctaatggtcatcagcgacaagccggtttgcaggataacgatggtcagcatcccctgaatcggcgcgccggaagccgagacgcgggagaagattttcgggaagtaaccttcgtcagacgatgatttaaagacctgcgcgatggtgaactgccagccgagcagcgaaccgcagcaggacatcaccatcagccccataatcactttacctacgccaggcgtgaacatctgggcaaacgccaggccaaacggcgccgtggagttagccaggtccatgttcggcacgatcccggcgatgacgttggtcgaaacgatatagataaccgccgcgccgagggtaccgccgagtacggcgatcggcacgttacgttccgggttttcgaccacatcggtgttggcgcaagcggattccagaccgaggaaggcccacagcgtcatggcgattgacgaaccaacggcgccgaagaacggtacgtggtgagggttccaggactcgacgtacatcgtcgggctaaaccagaaccagccgatgacgcacaggccgacaaccggaatgattaccccccatacggtgatgctactgatctggccggtaatgcgcgcgccgccgaagttggctacggtacagatccacagcaccccgatagtcgccaggccaatctgcaccggcgacagggtggcgccgaacagctcggtgccgtaacccaccgcggagatagcgatagcgacgttggcgatcagcagcgagacgccgtaggtatagttggccataaagttgccagacttgccgaacgcgtactcggcgtaaccgcccatcccgcctgatttacggctaaacatcccgcatttggcgaaggcccacgccagcgccatcgatcctaccgccgtcaccagccaggagatgatggagatagtccccacctccgccagcttggtgggcagcatgatgatgccggagcccatcatgttgaccatggttaagatggtgagctgtaccactcccatcttgttactggatttgctcatacagtttcccctttcagcagcgcgctttgtttctcgctttccgcgatgacatagcaccagacctgtttacggccatcgtgctcctggatataaaccccctgcagttccggcgcgaagcccggcagcaggttgatcccttcttccagtgcggtgaagtactgcagcaccgcgccgccccagacttcgcccggaactacacacagcactcccggcgggtaaggcagggcgccttcagcggccacgcggccttcggcttgcggcagcggcaccagatcgacctggccgcgcagataggcgtagttagcctcttgcgggttcatcaccacgcgcgggaagtgatctttacggaacatctctttttgcagctgtttaacgttgtgacgggcatacagatcatgcatttcctgacacagctggcgcagggtataaccggcataacgctctttgtgctggctgtagatagacggcagaacctcctgcagcggcgcatcggcgtcgagcagcttatcgaagcgcgccagcagggcgaccagctgctgcagtttggccatatcttccgccggggtcagcaggaacagaatggagttgaggtcgcatttttccggtaccacgccgttttcacgcaggaagttggcgagaatggtggccggtacgccgaaggcgtcatattcgccgctggcggtattgatccccggggtggtcagcagaagtttgcacggatcgacaaagtactgatgctcggcataaccgtcaaaggcgtgccagcgttcgcctgggccaaactcgaagaagcgcaggtcaacggcgatttgcgcggtttcatatgactgccacggtttaccatcgaccatttttggcacaaatggacggatgtgcttacagctttcaaggatcagcttacgcgccttgatgccgttcataacgcagtccatccacatgttgcggccgctttcgccttcatgcattttggcgttgatgtccagcgcggcaaatagcggatagaacgggctggtggaggcgtgcatcataaaggcgttattcagacgtttatgcggaacatagcgctgttgccctttgatatggctgtcttttttatggatttgcgaggtctgggagaaaccggcctgctgtttgtgcaccgactgggtcaccagaatgcccggatcgttttcgttcagctccagcagcagcggcgaacaatcagccatcatcggaatgaactgttcatagccgacccacgcggagtcaaacaggatgtaatcgcacagatgaccaattttatcgaccacctgacgagcgttataaatggtgccgtcgtaggtacctaactggatcaccgccaggcggaacgggcgggcatcctgtttccgattcggcgccacttccccaaccagctcgcgcaggtagcgctcttcgaagcagtgggcgtcgataccgccgataaaaccatacgggttacgcgcggtttccagatagaccggtgtcgccccggcctgcagcagcgcgccatggtgattggatttatggttgttacggtcgaacagtaccaggtcgcccggggtcagcagcgcgttgagcaccactttgttagaagaggaggtaccgttgagcacgaagtaggttttatcggcattaaaaacttttgcagcatgctgttgggcaatgcatggcgccccttcgtggatcagcaggtcacccatggcgacgtcggcgttgcacaggtcggagcggaacagcgtctcgccgaaatactcgacgaactgattaccggccggatgacggcggaagaattcacccccctgatgccccgggcagtcaaaggcgctgttgccctgtttaacgtaatcgaccagcgcgctaaagaacggcggacgcagttcggtttcatatttatgcgcagcggcttccagctggcggccgtaaaagtcgttgcgggtttcgtcgtgttcaaataccccctgcaccgaagccatatactcggccgggacaacctcttctttattaatagcgataaataccgggatgttatagccggtggcctttaactcatcgagtttaccgcattcgatatcttccagggttaatactaccgcggccacatcaataaagttggtttcgctagtattgacaatattacgctgggtagaaaaacagtttggacatgtacggctaacggcaatttttaaatcagtcattgttatctctttattttcagataatagcaggccctcaatttctcgaatgagaaattgattacgccggacaaaaggtaatagtctgccgctgatataataaatatcagtagagtaccttttgagatgcaataaaccctaccagtccggtggctggtaaatagcaggatttattagggcgagcgcggttagctacaggcgaatgcctgtattaacaacaaaagatgcaggaagacctgtatgctgaagcgcccgtagtcggaagactaccgggcattaaagaaatgaaaatcgaagctgttacggtgagcaaacatcataatatgcgttgtccgccttatgtgtggcatcatcctgttattgttttccatgatatacacctttcaaatgattgactgaaggtatggcatattctatatccggcttagacttaatctgtgacgccgatcactaatagcctctcattatgatatcaatagctggtattttgatcttatccaacattattcactggtttgttgtttatatgtaaatatattgtgttgcaatgtggttaaaatgaataatggccggttaatcattgcgttatttcagccatatgacggaaatatgtcgtatactcgggactttctgacttctaccctcttaacattatgtttattaaggattaagaggttcctgtagtacgaaagaacgctgtcaatcattatccctttattgccaacataaaatctgggaaaagagagcctggtcgagttttcatctaaaagatatcgctcaggggctagacaaaaccaccgtctggttatcaaatggttaaataaaattaacgcctgtgtgaatgataggcaggtagaaaaaatggtcaatacgcttttcggcatgacaaagcgctaagatcgccttattgggagaagttatgcattcctctgttaacaaaaatgaaagccggaccttctttggtcacccttaccctctgggatcgctgttcttcaccgaaatgtgggagcgattctcgttttatggcattcgcccgttattaatcctgttcatggcggccaccgtctatgacggcggtatgggcttagcccgtgagaacgcgtcggccatcgtcggcatcttcgcgggcgccatgtacctggcggcgctgccgggcggctggttggcggacaactggcttggccagcagaaagcggtatggtacggctcgattctgatcgcgctgggccatctgtcgattgcgctgtcagcgtttatgggcaacaacctgttctttatcgggctgatgtttatcgtgctcggttccggcctgtttaaaacctgcatctcggtgatggttggtacgctgtataagaaaggcgatagccgtcgcgatggcggtttctcgctgttctatatgggtatcaatatggggtcgtttatcgcgccgctgatttccggctggctgattaaatcccacggctggcactggggcttcggcatcggtggtatcggtatgctggtggcgctggtgattttccgccttttcgcggtcccggcaatgaaacgctacgacagcgaagtgggtctcgactctacctggaatagtcccgtcgcgaagaaaaacggcgttggcgcctggctgctggcgctggcggtcggcgtggcggtggtgattacgctgattgctcagggggtgatagtcattaacccggtggcggtcgccagcatgctggtgtacgtgattgccgcgtcggtggtgctctatttcatctacctgttcgtttttgcgggacttaaccgtaaagagcgcgcgcgtctgctggtctgctttattctgctggtttccgctgccttcttctggtcagccttcgagcagaaaccgacttcgtttaacctgtttgctaacgactacactaaccgcatgatcggcgatttcgaaatcccggcggtgtggttccagtcgattaacgccctgtttatcatcctgctggcgccggtatttagctgggcatggccggcaatggcgcgcaaaaacgtgcgcccgagcagcatcaccaagtttgttatcgggattctgtgcgcggcggcgggcttcggcctgatgatgctggcggcgcagaacgtgctgagcaacggcggcgccggcgtatcgccgctgtggctggtgggcagcattctgatgctgacgctgggcgaactgtgtctgagcccgataggcctggcaactatgaccctactggcgccggaaagaatgcgcggccagatgatggggctgtggttctgcgccagcgcgctgggtaacctggcggcggggctgattggcggccacgtgaaggccgaccagctggatatgctgccggatctgttcgcccgctgctcgacggcgctgctgatctgcgctgcggtgttgtgcgtgctgattgtgccggtgcgccgtatgctggagaacagtaaatccgtcgagcaaaaaccggcgaccaatgcctgattgcgcaagcggtcaatgaaaagccggcgctgagcgccggcttttttatagtaagcagagtatggaaacggtagcccggataaggcgtaagccgctatccggggatttccctgctcgcgctgcgcttagcagggttacggttttgcagaacccaccgccggaccgcggtaatcgccgccgagggccttaatcagcgtgatatcggtgctaaggcgctgggcctgaatatccagcaataacagctgctgggcgatggccggtcgccgcgcttcttccgcggcatagcggcttaacaggccgcgctggtgatgggcgctggcgctgcgggtggtggccatcgccgccgtcaccttcagctcctgcagcgccacctgctggttgagatcgttaagctgactggagcttatcgccacatcccgtaccgcatccagcaccgcctggttgtactgcttaatcaggatattgctcgccgtacgtaccgacttcagattggcgttcaggcgaccgccatcgaatatcggcaaatacagccccggcagcaggttaatctgctggaaggacgacttaaacagatcgccaacgctcagcgcgttatatccccagaaggctttaatatcaaaatgcggataaaaggccgctttcgccgcatctacctggctcattgaagcggtcacataaccgcgcagggcctgcagatccgggcgacgcgccagcaattcgaaggagagtgaatccggcagcgtttcctgcaacgccggcagggcgaccgggtggatctccggcatactctgcgcgtcggcgccaatcagcgcccgcaacgtttcacggtactgggttagcgtgccgcgggcggtaatcacctgctgctgcgcgcccagcagttccgcctgcgcattggcgatatcgacgctatcctccacgccgcgctgggtgcggtgttcatgcgcctgtagcgacagacgcgctatttcttctagctgctgcagcagaacgatcttctggaaggtggcctgcatggcgaagtacagctgcgccacgctgctggcgaggtccagttcgataccggcggtttccgcctggcgagcgttcttttcgccaatagccgccgcgacgcgggcccggtcggcgccccataaatcgatattcagcgttgcgccgacgcccacggtattgagcgtgtaccacgggccgtttttatccaccggcagagaataggagtagggccagctaaaggatttatcggttatacgcatccggttctgcgccgccacggcggtcgcctgcacgcccattgccgactgcgccagctcgacggtggattgtgactgtgagatgcgtagccgcgccgcctgcatggtcggcgaattttgcagcgcgcggtttaccagcatgttgagctggggatcgtgatacccttcccaccagcgggccgccggccagccgctattcgccaggtggatcacctgcgccagctgcgcctgttgcggattaacgatcggcacttcgccaggatcgtcttgaatcagcgcgcatcctgtcaacaggctgatgacgaaggccagcggtgagtagcgcagaaaacgtgctgcggcatccatttttatcatgacggttctgcctgtcgggtaaattcagaaggtttgtctgaccagtccggcagggtggtcagtaaagccgccagcggttcgccgaacggattagccggatcgacaaccagcggcgcgacgggtgtcgtcggctgctgacgttcaatatcatcggcatacgcctgtaactgttcggcgcagcggcttaagaaggagtctcccggcgcggcatacagccggtagccctcgctaagacgtactatctcctgcgcctgctgccaggtggctttgctcggccaggatttcgcctgcggccacggatgcgcgaaagtgcccagcggctcggcggcgacccgatgcagcagcgtttcgctggtggtcagcgcctggaacagcggcaccatctgcggcttatcatctttcgtgcgcaggaagttggctatctggcgatagagttgcgccagccgcgatttcagctgtggcgcttcgctatccggccacaggtaaagatggacgatcgatgagaccagtacgccgagcaaaataccgatgacccggtcgcgcagttcggtcagattggtcagtgggccaaaccagctgaggaaggccagcgagaaggtaaagccgatttggatcccggcgtaggcaatacgctctgacccggcggcaatccacgccgagagcgccattaccggcagaaccatcgccagcaggccgacgatggactcggtccatggctgtacaaagacgatcaacagcaacgccagcagcgtggcgagcagcgcgccgccgatacgcaaccaggttttttgcatcgtcgcccccagccccggctgggcgacaatcacgcagctcagcatgatggtgtggatcccttgccagtccgcggcggtatagaagacgtagcacagcagcgtcgccagcagggttttcagggcgaaatgcagataagcgggattgcgccaggcatccggcagcagcagcggtgacttctcggcttcaccctgcggcaggtcgatagtttcaccgctcgccagtttcgccagcacatccgccatctcttgtaaaatcagcgtattggcgccgcgatcatcaatggccggcgcggagaatgaaaacgacgtaccctcgttcatcgacggcgccagcgcctgtagcgcggcggcgatctgctggcgcgccgtggcgtgatcgtcgcccggttgcagcagcgccgcgaggtgatagcagcgcagggtggccgctatcagcgcctgccagcgcgacggatcggcggcaatttccggcgccgcaaaacgggcctgcttaaacaatccttgcaactgattaaaacgcccggcgatctctttgaaggtcggcggcgcggcgttctgcgtcagcacgtcggcgacctgccgctgcatcaccaccagttgggcgcggaattggtagccggggaaggcctggcgaaagcaggcgttgaccaggagcgtgaccagcgttgcggtattgatcgccacccaaagccacagcagcaggcgcaccagaacttcactttggctggtcatcgacgggaaggtctgggcataaatcaccgccagcgccaccacgaaaaacgccagcccgagtttgcccagcacgcgcatcagatacatcgcgccaaagaacaggcataccgaagcgaccaggcgaatcagcgggaaatcataggtccacttgatgatcagcagcaccagccccagcgccacgctgatggtgacaaaaaacaggacgctgcccagcttaatcatcagaatgttcggctggctgacgtaaaacaccacgatcagcgccacggcgagaaacgggatctgcagggtcataaacagggtgatcagcactgcgcagctcagcgtcaggcgcagggtatagttggcccgccccggcgcgtcggcgagctcccgttgcagaaacaaccagaaattatgcatgccggacccttatttcgcctgcagcacggcgctggcggaggcgcccatgcggaacagttccgggtcgggatttttcaccgcgattttaaccgggaagcgctgcgacacatgtacccagttgatgctcttctgaatcaccggcagcccgccaatgacgctaccgccctccggcagtacgcctgaaccaacggaatcgacgacgccgtcaaaggggcggctgtggttggtcatcaccgtcacggttgccggcacgccaggccgaacgttttgcagatcggtttcgcggaagttcgcaatcacataccagtggtcgttatccagcagcgtgaagaccggtttcagggcggatgcatattgtccgacggtggttttcagggcgataaccacgccgttaaacggcgcgcgaacttcggtgaactccaggtgcagttccgccagggcgatttgcgcgacgatcccggcgcgctgcgcgaccatcgcatcgacgccggtgaccgcggcatcagcctgtttagcctgcagcagcgtagcttccagttcggcgcgggcggctttttccgcggtacgcgcctgatcgagatcttcctgcgcggcgaatccctgcggcaccagcggttccaggcggatacgggtcgaggtagtctgtttcaccagcgccttcgcccgctctaccgcggcgctcaccgactgagcgttatactgctgggctttgatggtgcgttgggtcagcataatctgcgcatcaagcgccgccagccgtgatttagcatcgtccagcatcgcctgataggggcgcggatcgatgcggaacagcagatcgcctttcttcacccgctggttatcgcggatcggcatttcaacgattcgcccgctgacttccggcaccacgtcgatggtgtcggcgtagacgtaggcgtcgttggtttccggcgaagtctgtaactgccagataaccacgatcagcgccacaatggcggcgaggacgagagccaacaagggccattttttccgtaaaacgcttgggctggattgagtcataggtatttaatgtgcgaaaagaagaaaccacagaatagtggcaaatagaaacattaacgccaggtaacttaataccagcggggaaaagcgcgcctgccagcctttacgggcaatcaggatatgacaagggatcagcagtaatgcgccgcctaaaaagcagaagaaccagccggggaatgctgcgcctaataccggtatggcgggggataaagagcaaccggagaccgccaaaagaagtaataacaatgccgggcgcgcccgttttacaatttgcttcaaaggaagatacctgaatgttcatgccattgaacaattgagtttattcgtttttgattaaataaaccctcatacaccgcctaaattatagcgctgatggtttgcttagccgagttatggttatcctctgataatagtttaatttcgcgtaggtattaaaaagtcgctttatcattagcgaaataattgaaatagggcgtttctcatttctccatagtcagcggctatgccgcgagctattcttagagcctatcccagtaggcgtaattggcgcagccagtttgaacacggacagcgcgcagaaaccggagcgtacacgtagtacgtgaggattttgagcactgcccaggttcaaaatggcaagcaaaatagccctaatgagataggctcttaggtaaacataataaaaatactgaggcaatgtcatggataaggaactactggaagcgggctaccgggcctataccggcgagaagatagatgtctatttcaataccgatatctgtcagcactcgggtaactgcgtgcgcggcagcgcgaagctgttcaatctgaaacgtaaaccgtggatcatccccgatcaggtggatgtggccacggtggtcaaagtgatcgatacctgtcccagcggcgcattgaagtatcgccacaaataagcgaggaaatgatggaaattctggaaggccataacaagttctacgttaatgacgccgagggaaaccaggtggcggaaattgtctttgttccaaccggtgaacatctgagcattattgagcataccgatgtcgatcccagcctgaaaggccagggcgtgggtaaacagctggtagcgaaagtggtcgaaaaaatgcgccaggaacagcgcaaaatcattccgctgtgcccgtttgccaaacacgaattcgataacacccgcgagtacgacgacattcgcgcctgaaatacggcgccagctgtggctggcgccgtgctgcgattatccggccaaccggcaggtggcatgatccggtaaaaatcgcgaaatgatctctcctaggtgctcgcgagtgaccggtggtgagaacagatacccctggaaacgatcgactcccagcgcttttagctgattaaatttctccagactatctaccccctcggcgatgcagcggttctgcgttagctggcagtagtagaccaggcttttaatcaacaccagcgcgtgcgggtcgcgctgaaaatcattgacgatgctcatatccagcttgtagccgctaaaacgcgccgtgcgtaccgggaacatcacgctgctgtgcgagaagcagtcgtcgagaaagatgcgaaagccctgctgctgaatattactcatattctccaccgcttttccttgctgctgtaaatcgacggtttcagcaaattccagcaccagccggttggcccaatgggggttctgtagctgttgccaggcggtttccatcatacgggcaagattatcgtgataggcgatgcagggagggatattgaccgaaaaatagaactcgccctgatagcgattgatattctgcaccgcttcctgcaggacaaaggcggtcagtaatagccaggcgtattcggagtgaatatgcgggagaaattcgcccggcggcagtaccacgccatctttgcgccagcgggataagatctcgatgccctgcaggcgtaagcgctcgtcgacaatcggctgaaagaccggaaagatctgccggctgtgaatagcatggataaactcacgttcgaagggggtcagcgcggtcatgccctgacctgttacgcgtttgcttcggctgcccggaaatcggctcgccagatgcggatgatactccaccatcttgtttagtcctgaggttctttggttgtagagcgttttctgactgacgccgcggatctgcgcctggctggtgatgctgtggccatacagcagggcgagggtggcgttaagttcgattttgcttaagcccgacggcggcttgccgcgcgccagcgcctcaatggcggaaagctgttgcaggccggggtagccgaccaggccgccttgcagcaatgccgccagacggcggcacggtagatcggatgagaccgcctgcacggcggccagcaggcggcggtcgccaacctggtgcagtaaggtttgccataaccacggcgccggactgcggcttaagatcaccatgggcaaaggtcgtttggcctgggtgagtaaccaggcggcttcacgcaggacgaacagtagccaccagggatcgtcgggcagaaaaaccacgattttccggacgtcggctggcgcagatatcgacagcatgctctgcacccgcggctgtagccacaccggatggcggcaaccgtcgtcgaccattcgggctaatcccgccgccgccatggcgcagggcgacaggatgtagtctgtcgtcgcctgcgggatatcggctttactggtagacaaacgtcaccccaataatcgactggacgttacccgccgttacctgaccgctggtgcgcgcgtaggtggcggtcagcccgagattcaccggcgaagtgccaactgtacccagtgagacattgctgttggccggaacggcggtcccgttacgcgtcaactggacgccaataccctgtgccggcgaagcggaagcggtattgcgaaatatggaattggcgctatcggcggtggtgcccgtcaggtaataggcaaggttttgattttgcgcgcagtgaaccgtgacgggcacggccatggaacccggatagtcgggaagcgtaaccgtgacatcacgggctgacacgtcgcaaccgcccgttggtaccacgacattattattggcataaatattccaggtgaaatctctcgggtttccgtcgctggccactttatgcatattgagccgcgcgataagctcgccagaattaatcacgaccccgcccgcagcgccggttgcggtaaggtacatgcgcaacggtaatccacgataatctgtgtgggtgacgatgtagaccgacgagttcgagttcatcggtaatgggtaagtattgcctgcccaataaatgctcccggtaaatgcctccagcgcgccaccgaatgctgagccactggtgaggttgatatagtcaataatggagccgccgctggagtcatttttacagatgatggaagaagataaatcgacaaccaggttttggccgacgccaatagagggcgttaagttgacgtaaacattcgccgcgcctgaagtcatagtttgcccggtgtcggcaactttacaggtgaatgccgcgacgtccagcgaccagcccatcagcagcagggcggtaaacagagcgatgatttttttcataaacaaactctcctgactcaggcgtaggtataggtgacgctaatcaccgcctgaatggttccctgggtggcgccgccgttaaccgacagggcccgaacctgcagcggaaaacgcgccgactgcgaactttcgtcgacctgaaccgacttttgcgccccgttattgagcgtggtgccgctgtcgtcctgtagttcgagctggatatttcctgcggtaccctgattcttgtaatagccggtgctgtccgcggtgccgctaaaggtggcgacgacgcgtgacgtgccgaccgggcagttgcttaaatccagcgcggtgctgtgccaggccgaagcggaacccgccgataccaggctgaaggtataaagatcgccgaggtcgacgctggcgttagtggtggagaccgtacacggtttggccaccactttgccgttcaccgtgatggtgatgtcggcggcatgcagtgggataatgtttaacgccagcgcgcctgccagaagccatcctgcgtagtgtgctttcatctcagcctccggttactggaattcaagggtaaaggtggcggtggcgtagacgtgaccggcggtcaccggtacgcgggttgccatcagccgggcgtaaaaaccgagggtgttggtctgccccggcgttaaggtggtccaggcgatcgacgaagagggcgcgttgaccggcagcatcgtctgctggccgttgaggatctgcaccgccatccccgccgccgcagaggcgccgccgtcgatttttaacaggtcgttattgtcgctatccggggtgccgttaaagccgactttgaccgccgtcaccgagctgccgcagggcgacagcacgatgcgaaacggcaccagcggcgtggtcgcgccgacggcgttaaactgcttcgcggcgttgtccatcagatcgacggtaaactctttcgattcggtggccaccgcgcaggcgttgtcgcgcacgtagccgctgatggtgatggtgctgtccgccgcaaaggcgttggcgcagaccagcgtcaggacggcgccaaacaggttaagtggttttttcatcatcatgcgttccttaacggcactctgccgatagctggctcagcgcctgccgctgactctcttccggcaggcggtagctggccatacagctggcgtccgcgccttcgccccatttcacctgtacgctgccggcgagcggcatcccgctcaggtagacctggccgttatcggccacgatactgccgctctgattgctgccagaggtgaccatcgcgccaaacggcactggtttgccgttatgggtcaacgtcattagtaacttgaccccgacgtgggctttgaagtccgcccgcacgatagcgccgtgggtagggacaacgctgaccaccgcgtcatcgagatcgacgttatcggcaagggtattggtatccagcgccacccggttttcgcgatattcggtggcgtaaggcagcaccgcatagccgcgccagtcggtacgcaccccggtctggttttccactttgacatcaccggcaccgggcgctttcaccagcaccaccgtgtcattcagcggctggctcagggtcacgccgttagcgtgggccagcacaccgccgctgacgccgtagtagagctgtttgaaaccgtcgctgcggctgtagccgacattggcgttgccgtagccgccgcgatagttcagcgccgcgtagccggtgccgctgctatcgccttcgccgccgctggcgtagccggtctgcacgctatagctcaggttattgtcttccagcagggtgccgtaaagtcccgccagattggtcatccgaccatcaagatcgtgcgacatgctgtagctggcgctggcgtgccgccataccgatttgctgtcggaacgcagccagtggctgaacggaatattgacgttgaccgccagcatctggtcgcggccctgctgccaggcgtttttggtcaggctgtagctcagcgtccagttgatgtcgtccaccgccgcgttgagcccggcctgcagctgctggtccgccttgccggtcgaccagtaggtctgatggctgccgctcagatagagcgtggcggtacgccccaactgttgggtgacgcttagctgcactttgccgcgcttgttgtaggcgaggttgtagtaatcggtgaatttcggcttcacctggattacgccatcctgggtctctacgtcataaccgctcatccggcggtaggtagtatcggcaaagctgtaataacctttagtagagtagcgatagcccaccagttggatattggtgccgacatcgctcagcgacttgttatagaggaagcgaattgactgcccctgatgatcgctgtcgtcgggtagggtggcattggcctgggtgacatccagcgacacggcgccgaaatcgcccatatttttccccacgccgagattaaaggcgcggtagcggtcggcgagctgcgtaccgccatacagcgtccagcccgcaggcagaccgtgtaacacggtactctgaaagaacttcggctcttcttgctgatcgttgccgctgcgatattcgccagcggtcagcgcgtaccgggtgtgcccttcgcgctgcagtaccggcaccgttgaccacggcacgctgaagacctggctggtgccgtcgttttctttaatcgtcacctgcagatcgccgccgttgcctgcggcatagagatcgttaatggtgaacgggcccggcgggaccgtgctctggtaaatctcatagccgttttgtttgatcgacacctgcgcggtgccgcgggcgatgccgtggatcaccggcgcaaagcccttctggctatccggcagcatgttgtcatcgctcgccagctgggcgccgcggaagtttatgccgtcgaaaatatcgccgttggtgtagctatcgccgagggtcaggcgtgagcgtagcggtgtgatgtcgcgctcaagccaggtgttgacgtgttgccatttgttctcattgctggaactgctgccgccgctgctgtagctccaggtggtgttatcacgcagccgccaggcaccgagattgaggccgctttgcaggtttaaataagcgtagttgctgctgccgccggtatcgttatggacgttgttaccggtgaagttgtagttcagcagcccagcgttgatgccgtcatcccacatttctggcggaatatagccgcgcgcgcggttgcccataaaagcctgcggcacggtgaggtacaggcgctgctggccgacatcgaagcgcgtcgtggcatcagtgataagttcggtcagcggcacgcaggcgtcggcggcgagggcgctcatcccgttcaccgccgcggtattgacccccatgcccgccagttggctgcgggtcaggcacgggcttaacccatggcctttttcgccgcggttaaaagtgacatcgcgagtggtcataaagccgtcgttaaggtaaatatcgacgcggtaggtgccgggcggcacctcttgcccgttttcgaaaccggaaagatcggccaccgccgcaggatcgtcagctaaaaaacgcgggttaaaatagagttcagcctgcgcgtagcccgcctgcaggacaaaacagagcgccacggggagtttcgccatggccaaaatagcgcgtgggcggagcctcgcgctgcgggaaccaaaacggtcctgtccatatttgagatgtgacatagtccctccggtctcaattcgcccggctgtcagttcttattgttatgcgcggtttggcccgcccggcgggccaaacctgtattaacgcagcacgccagtcatttttggggtcagcgcgccgtaatcattaatcgtgcgataagtaatgttgctaccggcatccggcggcagcttgacggaggttttacccattggcggcaccagcgcgttttccagcacccgggtgccggcgttaagttcggtgacggtcaggtaataaggggtagggttagtcaacgttaacgacgaaccgctgcggctaaagctcagtttttccgccgcctgatccggcggtagcgccagcttcgccgggcggtaatagagcttgatgcggctgataatcgccagctgcagggtgttgtcgctcagtttggatttatccatcgacgggatggctttcacgttaatccagaacaggctttcgcgatcctgcggcagttgtttattggtggcgtcaatgatgcgcagggtattctcttttttgccctgcatggcgaacagcggcggcgtaatcacgaagcggccatctttgccgccgtcggcgttttccacccacgactgaatcagataggtgctgctgtcatcattattagtcacccctaactgcacctgtttttgcccggccggatagataacccgcgtggcgccgagcgcaacgccggcctgagcccaggcggagtaaccgcttgcggctatcatcaataatcccgccagtagtccgcgcgtcatccccagtctctttttcacgtttaccccttttgtactcaccgttgtttcctgtttccggcatatctgctggttaattactgataggtcagggagaaccaaacttgcgcgtttgccgctcctccggtgacctgattgccggtcgcccgatatttggctacaaaatgtagcgtggtggggccggtatacagccgccgccaggcgcccggcgggctattcagcggaatcaattgatcttcgttatcaaataacgcgatgccgacgccggtggcgatacccggtccttcgccaaccgagagcacatccggatttttgccatcggccacgccgcgaaaagacacgccgacatgctggctgactgcggtgctgcaatcctgaaggtgaatatcgaatggcaccgggttggcatcttccccggctgaatgaaagcgattactgctgatctgccccatattgacggtcatctgctggtcgccggcttcaacacggcaggactcagcgatgatgacgccttgaaaacgcatgtttcccccagccaccgtgacgttccagtggttgccggccagcgccagcggcggaaacagaaacatcagcagacctgtcttcactccttgcatcgttatcaccccaatcccgtagtggataacgggccatcctggcccggaatgcttccctgtctgatgtttgaattactcgtattgcactttgaaggtggcgtctgcgttagcagtaccggcagtagccgcgccagtggcgtagtaacgcgcctggaaaggaatgatgttggtgccgtcgttcagcgtggtggccgcgctgaaggtagcgccatccaggcccagcggagtgccggttttgtcgaggatctgtacgccaacgttggtcgcgccgccagcagcggagctctgcagagccagaacgctggtgttggtgctgtcaaccgcggtaccagagaaagcgacagaggctttggtggcgacagaggtatcacagtcgtctaactgaatgttgaaacctacagcggagctggtgctgcccgcggtagccagttttgccgaacgaacctggcctaactgaacggtctggtcgatagaaccggcatcgactgcacaggctgcgttgacgatttctcctttaaaatgcactgttccgccatttaccgtggtggtatcggccagggccgccgcggagctcagggacagagctgacaggacaacgattgccagtgttttgattttcatgctgttttcctttaaacaaaatcgatattacgaaccaaaaatggcagtcgtcttgccttccaggcattccataaatcagccgaatggtgcgactgccggttctgcacagtttttgcccctactgatgagtcaattggggccattttgactcatcaggatttatggcttttattttgttaaggttggtttggttttggatttatatacttctaatggtttgttttatggatttaaaagctatgactttgccgtgaatggaaaaaccgcgtacttgacttcgatagcgaaaagcgggcgaatgcgagatagtctgacgaggataagtaaagaaaggtcgttggagaattcaatgtaaatcaattagatataattttttttgatgaaatatgcacttgtcagttgcaaaagattacaaaacatttttatgatatagacagtttggccccaattgacttgttcgatattaaaaattttcctttttatcaatcggttatcctatttcttccgcgcttgtaaattttcgtctaacagattgtttctttcccaaatcccggcaaaacgcgctgcattactggcggtataacggacagtatgacgaatattacgatgtccgagataatcttgtatcaaacgggtatcagctcctctttccgccagttcatagccgcaggcatgacgcagcatatgcggatgcgtatgcgtcacggttcctgcttcttccccggcggcgcggataatgcgataggcctgttgtcgtgaaagcggggtgccgcggcgcgagataaatagagcgtcgcttttgcctgctgccttccagccggcccgttgctgtgtccagcgttctatcgcttcgcgttcatcaaaacgcagcggatgtacggtagagaaaccgttctttaagcggcgaacattgatgcgtccttcgttaaggtcgagatcgcgatagtgcagatcgagtaattcgctgatacgcaacccgtggcgaaacgccagcaggatcagacagtaatcccgttcgccggttgggccgtgctgggccgcctgcatcattgcctgaacttctttggcggtgagaaaacgacgtcggttcacaattttgagctcctgaatttaagtttactcgcaaggaacagcctgagaaaaaatctcaggatgcataaaaaataatctgaatggaaagcccgtattattttagagggataaagaccaacaggtatcacattacatttacacaaacataaattaccgctacgcgataattcttatttttatctattttattctttaccacaatagagctgtgccaggtcgcgggcaggtgcataaaatagcaaggaaaaaagttaatgccagctatttattgaacggaaaacatgtgctgaaaggattaatttaacaataaataacgaactaatatcctgatgaattacaggtgcataggaacgttttttttcatgttctaaataagaacttttaagaacaataaacatatttaacgtatggttaatttttattaatgtttcgcaagaaaaaatctatatatgaggaaagctgaaatttatcgcagcctaaacagagcaaatttgcaacagtcttgccggggatggcgggcaggggctggcagtaagaggggaaccgacaacgaaacgccatccgtggcgtaaggctaccttactggaaaagcgagattctttgcttctcgcgggaattatcccagataccataaaagcgcccggcgttactggccgtgtaccagacggtatggcgaatgttgcggtggccgagataatcctggataagtcgcgtatcgatgcccatattagccagcgcaaagccgcaggagtggcgtaacatgtgcgggtgaatttctagcggtaatcctgcctgatcgccggaggcggaaatgatctggtaaaactgttggcgcgacagaggattacccttacgcgataaaaataaccactcgctggtggattgtggatattcatcacgaatatccagccagcgctttagcgcctggatctctttattcagcaatggatgagtggttgagaaacctttttttaatcgatggatgtaaatacattttgaacgcaagtcaatatctgaaattcgcaggcgacaaatttcgctggcacgaaagccatgaataaaacaaagtaatgtcaggcaataattacgagctgcatgaggtccgctattggcagcattgagtaatgactcaatttcattctgagtcaggaagttcctttttttaatgtcactattattcttcattatgttccctttcttttgcaggcgtacattactatcccataggctctggctggcctattacaggatccgaagataggttgcgcattttatgaataagcatgatgcgaatcgcttttactatccctcaggtaacaagaactttatcgcggcaaagctgcgcgaaatcctgtggatataatgaagtggcttcatcgcccgcaagctgtacgcaggcgaattcctgatgcgaagcgctcaggcatttgatgtacatcggttttcctggaggtttacacgtcctgttcatcctttctcctcttgagtatgcgcgcttacagcaaggtcatagactaccggctgataaactgagtcctggctggataacgctgcaaaccgttatccatgaggataattgcctcaataaacaggttggcgttgcgtaaatgttttgccatacaaaatagcgtaagacacctgatagcattcaccgcaacactacaacagcgattaaaccatactgcaaaaatcgtagagagaatagcgttaataaatgtgcagacgtttcaaagagagattttacttattatcgagcagtcggaattttccgctcgtgtaatcagttaatgagagacttaatcggagtttttaggaagttttaagaagttattgcgaagcgcaatttctgctgtaaccgcttatgatttataggaaatttatctctggttgtatcagaaaataactgcccgggcttgtcaggctcaacaacgtaatagtgaccagagagcccggattatatttgttgatgaagccgtatggcgctaatcaacttccccagtaagcgccacggcttacgaattatcttaactgctggtaaaacaggataatcgcaatggcaatcatgataagccctgaaaccatgctcactcctttcgccgcctgtgggcgggccgccagtaccgcccgcgccccatagccgaccaacagataaattagcgtacaggtcatcaggtgcatcgcacccagcgccgacatctgcagcgccagcggccaactgccgtgcggatcggtaaattgcggtagcagggcgaggaacaacagaaaaacttttggattaaggccgctaatgcataatcccttcaccgcccacgcattccaactgccagccgattgttgcgccgcgcccggcgccgccggatggcgtaatatcatgaccccgagccacaataaataggccgcgcccgccagggtgatcgccgatagcgccagtggatgaccggcgattaacaccccgacgccggcgacgacgataatcgttgccagcagatgtccagacatcagccccatcaccgccggaacgacgcgacagccgttgataccggcgctgatggcatacgcccagtcggcaccgggggtaataatcaacaggaatgagactatccagaagctggcgatcaggcttatttccatctgcaacgctccacaacgatattagacatcacacactcgcaaaattaggttatcgtgtgagaaagaatatcgacatagaagcgaaatgagctttcaatgttatgtcataatccggcgataaaagagaaaatcttccaaatggatagcatagatcgaaaaattcttgctgagctgcaggccgatggtcgtctgtcgataactgaactggcggagcgggtgaatttgagcctctctccctgccaccggcgactacgcgcgctggagcaagagggggtgatcaccggctatcgcgccaatctcgacccgggaaaaatgggcttcaattttctggctatcgttttcgccacgttaaaagagggcgataaaaaagcggtcagcgcttttgaggaggcggtggcggagatcccgcaggttgtgctggcgcaacgattgtttggcgatccggactatctgatgcacgtcgtcacccgggatcttcctgcgtttcagaaactctatgatgacaaactgtcggcgatgcccggcgtgcagcatttacgctcgacgctggtgatgaaaaccgtggtgcaggatcgccctttccccctggagacgttaaacgcctcacgctaatgccctgctgccagggcattgtagaatggcgaattaccacttttcatcacgcgcgtcgcggcggccttcgcgccgattttcacgcttatcttcgcgacagcgcatattgctcttatcgtcatttctcacgcattcacgtttttcttcacgtccactctggcgcgcatcctgacggatatcgcgagcatcctggcgtttttccgcgcggtaggtggcgtgcgcggtgagggtcggcagcaacagggcggcggtaagcagaggcaggattatttttttcattgtcggaaccttaaatataaaaataaatcacggaaggttataattgtggttcgtaatcttatgtaaatcgatacaaaatgtgctgaactctcttttttttagtttattattaaacaagcccggcaagttctcattttattattctcgttgctacgtattttagcttattacgctaaagagattacgaatatagcatcagggctcagtcgctttaagtatttgccttgatttttatcaacgttccttattcatccggttgtggcggatatttggccgtgcgatgctcgcggcgtgagatttttctcagtccccgcgaagttaaatggaattgttaataaaaggaatattatatgaagcgttcagttattgctgctgcagtattttcaaccgtgctgatgagtgttaatgcttttgccgcggcgccaagtgaagagcagggcgagttagttattattggtaatgttattaattcttcctgtcgttttgaaagcgattatagcagtacgattcaactggctgatgttgacgctacccgttttgccggcatgtcagccggtgaagtcttatccggcaatttcgctaccagtagcgatccattaactatcgtttgcccggaaggcacggtattgaaatcgattgatattagcggcgggacctatactaccggcggcgtacttaatcctatcgcaactacaacgtctgctaatggggtcggttttaaattaagactcggctccgcggatattaatgaaaataccatatatgacgtcaataatttgccgggtgcggtgacttctttgggcaatggcgtttatcaaatgaacttttcggcgcaatacgcccgaattaatgccgccacaccggtaaccgccggtgaagtccgctcggtgttaacgattgccgtctctgcggagtaaggaactgtgccggcgcttcgccggctattattgtgctaagggtgtggtgctatgaaacggattttattagcaggtttatttatcgctatgcagcccgcgcatgccggagtggtgattttcggtacccgggtggtttatccggctgagaaacaagaagtggtcgtacagttgatgaatcatggcgcccgctcttcactggtgcagtcgtggattgacgatggcaatacttcattgccgccggaaaaaatcaacgtgcctttcctgctgtcgccgccggtggcgcgcataacgggtaactccggtcagcagctgcgaattaaaaagttagccaacaaacttccggcgaacaaagagtcgctgttttatctcaacgtactcgatattcctccgaatacaccaggaagtgagggggcgaatacgctgcggtttgccatgcaaaaccgcattaagcttttttatcgccctaaaggtatcgcggcggtaaataaagatacgtttaaaagtatttcgttgtcttcgcgcaaaaacgctctgcatattgccaatggttcggcaaattggttgacgattactgaaattaaactcagtaacgttaaagtcaatgagcgcagcgttatgcttgcgccgttatccagtcaggatgtctttttaaaaaataatctcgcccgccagtattcgctaacgatgattgatgataatggaaactttattagcgacaggctcaatgtaaaataataaataatggagttggccatgttaaggatgacgccgctttcctcaatgatattgttggttttattatccggtcagctgcaggccgctgaagagacttttgataccaatttcatgatcggcggaatgaaaggtgaaaaatcatcaagctttcactttgcggataatcaaccactgcccggtgaatatgaattagatatttacgtcaataaacaatggcgtggtaaatatccaatcgtagtcgccagtaatccggatgatacctgcctgtcatcggcattattacatcagttgggaatcaaagcggatagcgcgccgttggcaaaagataaccagtgcatgacgcttaaatccgcggtgcggagcggcagttatacgtttaatatcaatatttttcagcttgatttagaaattccgcaggcctacgttatggatcttgagcgcggctacgtcgcgccggaaagttgggaccgcggcgttaacgcgctctatacctcttattatctgagccagtattacagcgactataaagacagtggcaataacaaaagcacttacgcccgcttcaacagcgggctgaacctgttgagctggcagttgcactctgatgccacctacagtaaagccgatagcggcggcggcgactggaaaagcaacaccctgtatctggagcgcagctttgcgccaattttaggcaccttgcgcgcgggcgacatgtatacctcagcggatattttcgatgcggtacgctttcgcggcgttcgtttgttccgcgacatgcaaatgttgccaaactcaaaacagaactttacgccaatcgtgcaggggattgcccagagcaacgcgctggtaactatcgagcagaacggcttcaccgtctatcagaaagaggtgccgccggggccttttgcgattgccgatttacaactcgccggcggcggggcggatctcgatgtcactatccgggaagccgacggctcggtaaccacctacctggtgccttattcctcggtacccaatatgttgcagccgggggtgtctaaatatgacattgccgccgggcgcagccatattgaaggcgccagcaatcaggaagactttatgcaggccagctatcaatatggcctgaacaatctgctgaccctgtatggcggtaccatgctcggtaccgactatcaggcttttactatgggaaccgggtggaatacccatctcggcgcggtgtccgttgacggtacctgggcgcgcagcgatcaggataacggtacttttgaagggcaaagttatcagattgcctacaacaaatacctcacccagactaaaacgcgcttcggtatggcggcttatcgctattcaaccagcgactatcgcacctttaacgatcatgtctgggcgaagaaccgtaatagttatcaccatgatgataatgacgtttacaacattgatgattattaccgttatgattttggccgtaaaaatagcttatccgccaatattagccagtcgctgccggaaggattagggtctttctcactgagcgctttatggcgtgattactggggaaaaagcggcagtaataaagattatcaactgagttacaccaataactggcagcgggtttcctggaccatttcggccagccagacctatgacgaggatcatcatgaagataagcgctttaacctcttcatttcgattccgctgatctggggagagagcgatagcgtgctggcgcgtcgcctgacgctgtcgaattcgacgaccttcgataacgacggttttgcctccaataataccggcatcagcggtacggctggccagcgcgaccagtttgactatggcgtgaacctaagccggcagcagcaaaaccatgaaaccaccgccggcggcaaccttacctggaacgcgccgctggcgacgctgagcggcagctacagccagtcgtcaaaatatacccaggccagcggcagcctgtctggcggggtggtggcctggtctggcggcatcaatttcgctaaccagctatcggaaaccttcgccattattcaggcgccgggcctggaaaatgcttacgtcaatggtcagaaatatcgcaccaccaacgcgcagggaacggtcattttcgaccatgtcttgccctatcgcgaaagttcgttgctgctgaataccgccaatacgcagagcaaaaccgagttgattggcaaccggaaagcggtggctccgtaccgcggcgcggtggtgctggcgcggttcgataccgaccagcgtcaaccctggcttattcacgccgaacgcccggacggtacgccgctgaaatttggctatgaaattgaagataacgacggacagaatgtcggcgtcgtcggccagggcagcatgctgtatatccgcaccgataacgttccgccgtcgattaccatcgcggtcgataagcagcagggccattactgcaccattacatttaaacataccattgatgaaggtaagacctatgtctgccgctaaaaggacgattttcatgaaatggataattttgctggtattaagcttatgctcttttttagcgcgggcggggaactgcgaattaacgccgagcatccctccggcgtcgattgaggctagcggcaactacacttttaaaccgctggccgccaacggggagctcaatttacgtgatagttcacttcaggctaacgcattcagctttcgctgccccagtaactcaaatattacggtctcggtcagtctgcaatcgccaccacaaacctcctactatgttgaggtaggcagtaagatctatgagattaatttctccttcgaccagacaaaaatggaatcgttgggaaacggaaaaattgttgaaaaccaagtatataatttggcagatatgtttaatagtttggtcggcatacgctatgagattaaagaaggtagcgctaacgggcagcgtgttactcccggagtacctttccagatgcgttacggtatagttttgaaatattgtaagaataatgaatgtcataacgttaacatcaattacacctttaacgtcaccctgcaggtaaatatcatgacctgtggttttaacgtcccgaaccgcttcattaatatgggcgattacagctacttcgatattaaagaagacaaagcgcaatatcgcctggaacgcgttgatatcgactgtagccgggacgagtcggcggtattcgaactgacgccgggtaaaattgattactactttgtcgccgcctccggctttgccggcaccagcaaaatattgaagaatgacgatcaggatgccgccaccggcgccggcgaagtcggttttcatctgctcgatagtcagggcggggaactccagtacggtagcggtttcctctaccactccagtgaggatgcccgacatggcgatagcaacccgatctatctgcaaatcaagccgatgaaatatggcgagaatatccgcggcggcacgattaaaagccgggttattatcgtcatcaacaataactagccgtccgcgccgcgcgccttcctttacgcgcggcatgcctgggttaggtggtcgcgaccgcttcaggtcgcggctgcggctggcgaatacttatcagcgccaccagcgccagtagcgcaaaggccagcagcatcagcgcaatggggatatagctatcccacatcattaaaaaggctaccgccagcatcgggctaataccaccggaaatcaccgccccaatctcatgccccagcgccagcccggtgtagcgtacctccaccggaaacagatccaccatcagacacggctgcgcggcaatcattgcgccatggcacaatggcaatgccaacagcatggcgagcagcatcgccgggaaggtgtgcatattaagcagccagaagaaggggaaggcgaccagcgccatgcctatcacgccgatatagtaaagccgcttacggccaatgcgatcggaaagccatccccagccgagaatcgtggcgatctccaccgtcatggcgatggtgaccgccgcgatcaggtcgcgggtgtcgatgccgatatgtttgcaatagaccactgaaaacgtgaagaagatatacaccgcgccgttttccgccagccgcaggccgatagcctgtaatatcgctcgtggatgatttttgaaggcgctgagcaccggtaaatgatgggcctcatttttgctgtcgttttctgctttgcgcgccacgaattccgcgttttcctggatgttacggcgaatatagacgcccaccagaaagataaacaggctgagcaaaaacggaatacgccacgcccacgacatcacctcttcctgcggcagcagctgcaccagatagaatgccagcgaagaaagaacaaacccgccgcagacccccacctggctccaggcggtgtagtaccctttctggctttccggcgcattttcgctcagcatcaacaccccgccgccccattcgccgccggaagccacgccctgtacaaagcgcagcgtaatcaaggcgattggcgccagtatgccgatatgggcgtaggttggcagcagaccaattaagaacgtactggcgcccatcagcgtcagggtgatgatgagcgtcattttgcgactgtagcgatcgccgagatggccgaatatcacgccgccgagggggcgggcgataaagccgatggcaaagccggaaaaggctaaaaatgaaccgagcagcgggtcattcgtggtcgggaaaaacagcggcccgaagaccagcgccgccgcggtgccatacaggaaaaaatcgtaccattccagcgagttgccgagaaaagacccgatgattaatttgcgcataggttgcgccggggggaccgttgtaccgctcacagctccagacataaggttaactccagtgcaggtgaatcaggcggcgcctgctggcgccgggcgatgggtcggcagggtttttatggttatgatgaaacttaacggcacgacgccatgctaagggtatggtactggcgattaaaccagaccagcccgtcgctggggttgccgaagcggatctgtttgacctcgcaataaaatacgctgtggctgcccacttcatggctgtcggcaatgacgcagtcgcagttcgccacggcggaagccagcgccggcgaaccggtctccagcgccagccattcgtcgtgcaggaagcgttcttcagagcggatttggccgttggcgaaaatcccggacaattgctgatgctgaccggagagcacgttaacgcacagcacgccgttgtgctggaatttgccgtgcgcgaaggacgagcggttcatacataccagcagcgtcggcggcgaatccgtcacgctacacaccgccgaggcggtaaaaccgaagcggcccgccgggccatcggtggtaatgatggtgatcgcgctgcccagttgcgccatggcattacgaaaatcagatgtcaggttcatagtaatacccgttatttcagtttgacgtattcgaagccttcgataaccagccgcggggttttggcccgcgaacagcacagcaggatctggtcgttatcttcgcgttcttcttcggttaaatactcgtcgcggtggtcaggttcgccgctgcaaacgttggcgaggcaggtgccgcagacgccctgttggcaggagactttgactttgatgccggccttttgcagcgcggcgacgatggtctcgttttcaccgacggtgacgctcagattgagttccggaaccgcaacctcaaagctgtcgccgctggtttctacctcgcggttgaaatactcctgatgcagccgctccgcgctgaaaccgcatccctgagccgtttcgttaatccacgccataaaaccctccgggccgcaaacgtacaggtggccggcggcggcgtgaggcgtcaggagttcctgagggcggatccggccgttttcatcgctgatatgcagctgaacctgagcgctaaagtggcaatccgccagttcggccagaaacgccattccctcacggctgtggccgcagtaatgcacttcgaaggatttcccggcgcgaaatagcgtatcggccatcgccagcatcggcgtgatgccaatgccgccgccgatcagaatgctatgaggcgccgacatctccagcgcgaacaggttgcgcggagggctaatttgcacctcgtcgccgggctgtaaagcgtgcgccgccagcgaaccgccgcgcgaggcgcgatccttgaggatccccaaccgatagcgctgcgggtgatgggcgctgccgcacagcgaatactggcgcacgatgccatcgccaagatgtaaatcgatatgcgccccggcgctaaacgagggcaggggagcgccgtccggcgaggccagcgtcaggactaccacctcggctccctgaatttcgcgttctgtgacgcgtaccgtcaatgtttcagccatagtttttctccacccgcgaagggcttaacgcatataaatgccgccgttgatatcccaggtcgcgccggtgataaaggtggcggagggcgccgccagcagttctaccgcgcgggcgaccagcagcggatcaccaagccgcttcatcgggatcatctccagcagcgccggcattttctcctccggcaccgcggcgcgaacggaaggtagatccagcggccccggcgcaatcgcgttgacgctcaccccggcgttgctcagggcgcgggcgaagactttggtcagcgtaataatgccgcccttggaggctgcatagtgggcgccggaggcggtaccgccgttttgcccggccagcgacgcgaggttaataatgctgccctgctggcgctggctgaaatagcggccgatggtctggcagccgacgaaggtaccgcgcaggttggtactggtgacgcgatcgaattcttctacgtcgatctccatgatcggcgtggtcagggttaaggcggcgttgttgaccagcacgtcgagttcgccgaaacgtgcgcggatctgcgtcagcgcgtcgctgaactgttgcggctggcgaatatccagcgccagcggcagcagccgctgctggctgggatcgatctcctgggcgctgcgggtgaccgtatcgagattgaggtcggccatcgccacctgatagccctgttgccagagatggcggctgataaccagcccgaggccgttggccgcgccggtaataagtacgctacgtgtcataaagtcctcacaggatgtagccaatgctatgcaggtaatcgtcgccgttaatcaggcgtacgaccttttgcaggatgcggaaactgtcaccctccggcgccagcgtccaggtgacgtcagcggcgtagtgctgttcattgcccttgcggtactcgtaaaggaattgggcgcagcgtacttcgacgacctcatcgctggcgctgagcaggcgataacggccgctcatgcggatagtgcgcgcgcgcggtgtggtggagatcgattcgccgctgtataaacgctgcacgcgtttttcccgcatctcgtggttgtcgtaggcgtagttgagcacgttggcgaaatcggtggtctgctgatcgatgggaatgatgtacattccctcagcgtgccacagcgccagccattcacgaaattcgccttgatcgagcaggtccgcttccaggttaataaactgaatggcggcgttgaggataggtgatgtgttcattattgcccccggttatcagcggtcatgtactttttccattgttgataggcggcgcgcatgccggtttcggcgctgacgtcgctgcgcaggccgtcggcggtgcggacttcgccgggcaggccgcggttgagcatgatccacagatcgtcgcccgcgccgccgccgcgctgcacccgctcccaggcctctgaatcatcgggggtgccgaagcccatcggcccctggaagtgttcgtgcagccgcaggcgcgcctggttggcgatcgccgggccatctttcatggtcagcaccatgtgatgaatttccgtctcttttaccgatatcggctgcagcacgcggaagaaggccattgaacaggcgacattggggaacaggttaaggttaaaaccgctgccgccgaccgcgcgtacgatgcgccgcacctgctgctcgtcgtgaccttcctcgcgtagggcctgggccagctcgctaaagcgctccgggattggcgcatcgagattggcttccagatcgataagctcggggatcatcaccatcacgctgtggccattgccgagatcttccacgaaacctttgccgtcgacgaagttgagcatctcttcggtctgtttatcgaccgagcttaaaaacgacttatggacgatcgggaagtgatagccgtcggtggtattttccagctggattttccagttgccgggaaagcgaaaacggtgcgcggtggtggcctgcagcgcgtagccagccccctgtttcatgaacagatccatccatttcatcgccgggccgaggaagtcggtcagcggttcaatgtcgtggttgaagctggcgaaaatcattccggcgtagctttcaacgcgcaggcgcaccatgccgagctcagatttgttcagcgtatcgccgtagctctctggatgcggtaccccgcgcagcgcgccgtcgaggccatagccccagccgtgatacgggcaggtaaaaccgttcgttttcccgctgcgatgttcgcagacggtggcggcgcggtggcggcagcggttgagcagcacgttgatattgcctttgcgatcgcgcacgacgatcaccggctgggtacccaccatcgaggatttatagctgccggcgtcagggatttcgctctcgtgggcgacccatacccaggtacggttaaaaatgttgtcgatttcgaggtcgaaaatttcctcggaagtatagagacaggtatggacccggtcgctttgcaccagtgccgccagcgtttcggcggtatggctggtatcgatattttttaccggaatacattcagacattgtcactctccacatatctcttttaatgatcatcaggcaccggtaaatcggcgagcgaatgccagtcatctaccgggcggctaaataaattacgggtggtaaaatgatgaattaaccactgttgatcttgtttaataaattcaatgacgagctccgcgctatttaaatgcgagccgccgcggcgaaacgttgaagcctgcagcattttccagcggccgaccgcgcggttattttcgtcgacgcgaatatgctcggccgttaaataatgtacgttgatggcgaagtgtgacggctcgctaatataagcgttcatcatcccgacgatcgccgctctgccgcaatggcgcccgagcttgtgttgatataattcgccgatgccttcccaaatagccgtttcgctaaatagcgcgccaatttgccgggcggtatccggatgcgtcaggtcatcacagagatgcatatactggctgatggcgttacggatctgcactacggcttccagcttttccaggcgttgcagcatttcttcattcattaccggctccgtataactcataaatagcctggctgcggcgagtggccgaagaacatattgccggcgttgatgtacgtcagctcgcccataaaggcgtgctgggtgatgaccatggagtcgcgggcatagcgctgcagcgggctgcgcatcgatatgcccggcatcccggccagtttcagcgcgcgggtggtaaccgaagcagagacgcgggtaatgtgggtggaagagaggcgcatggcgttaatccgctcttctcccggttcatcgccgcgcagaatcgcttgccagacatcgtcgatggcgtcgtagaaccagcagcgcgccgaacgcagatccgcttcgcagtgagcgatttccatctgcgcgaattggcgatccgccaggcacggcgcgccggtgaccgagctctggcgttcggcaatggcgtaaatttctgataacgccgcgcgggcgatacccagcgcgaccaccgacagcacctgagtggccagcgacagtaccggatagcgatacagagggccttcgaggttaagttcgccgccgcgaataaaggtccactcctgcggcacgaaggcattattcagcactacgtcatggctgccggtaccggagaggccgaccgtattccagaccggatcgatggtgaactccccggcgggtagtaccgcgatgcgcggcagcggacgatcgctgccgtcatcggtcagaatacccacgccgataagttcggcgccgctgcagccgctggcgaagctccagcgcccgctgacgcggtagccgccatcctgagtcgtcgctttttgcggcgggaagatcccgccggcaaagacaatatccggcccgtggcggtaaagctcatcgagactgctcggcggtaggccgccaagataaaacggattcatgccgaaactcgccacccagccggcggatccgtccgctgttgagagcgtttcaattaactgacaaaactccgcaggtgatatttcatcgccgccgtagcgttttggcacaagcgcgcgataaacaccgatctttttaaagcgggaaataatatccgctgggatatatttctgctgctcgaactcctcgctgcgctttttaatatctgcgagtaattcggcaaactctattgtcgtggcgtgcagggtcttttccgcacgcgaagttgcagaggggtttaacatgcgatttagcctcttccagttaatgaaagtacggttttattattttaatttttccagcaaatactcagcgtaattaagtaaatcaaactctttatttttattggcgactaattgcagagccaccgggcgatgattaatttcgccaagcggaaggctcagggccgggtggccgcttaaattaaatgggcgcaccaggcgagtcaggttgaccaccttgagcggatccgccgcttcttccagcgttggcgggcattccggcagggtcggcagcagaatcagcggggttttcgccagttgggcatccaccgtggcgctaaattgctgacgcacgctttccgcagcctgccgttgctgagggccaatctccgcgccggcgcggatccgccgggcgacatccggcgccaggttcggcgcgttgatgatgctgtgaaacgccagccagttttcctggcttatcaccgtaagcccggcctgatgcgcttcgttgaaccccggtagttcagcgcgagtccatgccagccccgcctgctgcagacgtgagacgatcagttgctcaatttctggcgttgccgtgcccgccagataacttatcgcgggagctgcccggcgcgcaggaggcgctgattcccccagtgcttttgccagcgcctgacgcaatgtggcgatatcgcgggcgaacaggccgacgcagtcgagcgaactttccgtcggcatgacgccagcgcggctcagacggccaaagctcggcttcaggccaaccacgccgcagcaggccgcgggcattcgcaccgagccgccggtgtcggtgccaacggcgaagtcgacttcaccggccgcgaccacggcggcggagccgctggacgaaccgccggggattaactgcggataatgcgtattgcgcggcgtaccgctatgcgggttgatgccggtgacgccaaaggccagctcgtgcagggtggttttgccgcgcagctggcagccgttatccagcagcgcctcgactacggcggcatggcgaacggcaggcggcgcatcctgcaataccgggctgccggcgcgggtcggaaaaccggcaatatcgagactgtctttaaccgcaaacgtcagctcgccttcgccaagggtgaagcgcgagataaacccggattctgctttttctgcctctgtacgatgttcagtaaccatgtttcacatctccgtgagggggataattaccgcgcgaaatgactaaaaaacgacccgctggcgtttgaggtaatcttgtcagtaaaacttgaaatttcaagtaatttgttacctgttttttacatcgtaattgacgataagatgatgctgtgaaagagagattgttctttaactaattgatttaaatcattaaacattgatgtttaaattttaatctcttgaagggcgtcacaaaaataaatgaaaaatataagttaaaaaaatgataaaaaagtgtgcgaaaaacgcaggggagggtaaaacaaaatgaataaccatttatagtaaatggttattttcgcagaggatcagtcatcgaggttgtgcagaatgagcgccagcacctgattcatctttttttcctgcgccggggtgacgcccttgaaggctttagcaaacacggtttccgctaatgcccgggcttcggcaaccttggcttcaccggcggcggtgagttccgcttcggtgacccggccatcgctgacgctaacgtgggtcgtgagcaggccatcatcgcgcagacggccaacaattttggtcaccgtcggcatcttactaacggcatattcggtgatccgcgaaatactggcgcggtggtattggtgcaccagcatcagtacgcggaagcgggaaaggtcgatgtcgatttttttgagctcgatttccattaattgggtataacgggcgtaaacgttaaccacccagaagaaggggaactcttctttatgaaagcggctttcgtggctctctggcggggtcgaagagtgagtcttatccacaagcatctccttgcctgatgacgatagaatgtgcagatggtatgcgcatttagcggttattgcaaaacgcggtactgcgaaaaccatgcgctatgatgccgggaggatggcctctttgttagccgcgcgttgttcatcgtagcaaccgcctgtcgccggaggtcactcattctccagcagacgcataaatacccgtagcgcttcgtctaactgctgaagttggggggcggaaagccccgccagcagttgctgctcattcgccacatgggtggcaaccgcctcatcgatcagcgctcgtccctctggcgttaacgcgaccagcatgctgcgggcatcctgaggatttgctaagcgggtaatcaaccctcgtttttccagcgccttgaggcgatgggtcatcgtgccggaggtaatcatcagtgtcgaaaagagctgggtcggcgacagcacgaatggctcgccggcgcggcgcagcgtcgccagcatgtcgaactcccaacgtaccagcccatgtttaacaaacgccgcctccacccgcggctccagcaacatggcgcagcgcttgaggcggccaatcggccccattgggctgcaatccagatccgggcgctcgcgctgccattgggcgagaatgcggtcaacggcatccgttggcggtaatttgtccatgtgtgctcacttgtcttgatatcaagatatttatcgatacatacttgctgcacaatttaacttgatatgaagataaaatcatggccttttttactcgtcatctggcggtcgatctgctgctgaccgcgctggctcccgccatctggggaaccacttatatcgtcacttcgcaattcttgccgccggaccgtccttttatcgccgcgctgttgcgcgtgttgcccgccgggattgcgttgttactgtggagccgccagtttccgcagcgcggtgagtggtggaagctgatcattaccggaatattaaatatcggcgcctttcaggcgctgctgtttatcgccgcctaccgcttgcccggcgggctggcggcggtgatcggcgcgattcagccgctgctggtgatgctgctggcctggtgcgtggatcgccagcgttcgccgtggctggcggtggtttccgcctgcgccgggatcatcggtatggcgatgttgctgctttctccgcgcacggtgctggattcgttaggtatcggcgccgcttttcttggcgccgtcagtatggcgctgggcacctggctgtcgcggcgctgggcgctatcgttgccggttgtggcgatgaccggctggcaattgttgataggcgggatcgtgttactgcccatcgcgctgctggtggacccgccgttgctcaacatcaccccattacaggcggcaggttatgtctggctgtgtgtggccggagcgatgctggcgtatggattatggttccgcggtatcagccgattatcgccggtggcggtatcggcaatgagcctgctaagtccggtgacggcggtgctgctggggtggatctttctcgggcagaaaattgaggggatggcgctggcgggccttattgtggtactggcgagtgtgctctctattcagcgcgcgctggcgaaacgttgacgtgaaaaagccccataaaggggctcgacattgccgtgtttttttacgtggcgggagccagaccagccgtcctgagacgacctgtccggcagctccctctgcgaccattcggttatttagacagttccgccgtcatgtgtacctgattaccggtataggcttcggtaatgtggtaagaggcgccctgatctttagcgatagcagcgatttttgcttctgcgttgtccagagtatcagaggtcacgctcaccgggtgagccgcgaagcttgcgaaagaaaccagagacagcataccagcagcagcaagtaattttacgtttttcatggtgtttatccttttaacttttatggtggaaagcgttgtgctttcgatgggtttataataagtctgctaactataacgtacgttgcaaaaagtgcgatttagatcacatttttatgacggctggatgactgtaaatgggatttttattgaaaaaaactttgaaaacagaatgttatatctcatcttcgagagtgctaatttccgttgacccgcgtttaagcctcaacagaatttcgcctggcattgattgtgtgaatggtttggtggttttttggcttgttgtgaccgcgatacttcgcccgctggcgaagcattgctagccatcggcgcgctacagtgcggcttcattcattgctggaggaaaaaaccatgattgcggtactctttgaagcacaggtcacgccagcgcagcaagaacgatacctcgcgctggcggcgcagttgaaaccgctgctggaaaccatcgacggctttatcgccatcgagcgttttcaaagcctcagtgcgccgggaaagattttgtcgctgtcgtggtggcgggacgaacaggcggttgcagcctggaagcgcaatatttgtcatcaggcggcgcagcgggaagggcgggagtctatctttgctgattatcagattcgcgtggcgcaggtgttgcgtgaataccagatgcagagttcgcattctgcgtaaccaatattaagcggaggcagtatgttgcaccctgcggttgtcattgatgatgacgaagcgctggccgtcgcgatggcggcggttgcctcggcgatggctgacccttcacgagtgaaaatactctgcgcgctaatggatggccgggcatggacggcgactgagctctccggcgcggcggatatttcgccgtcgaccgccagcgctcaccttagccgtctggtcaacagtcgcttactgatctgcctggcgcaagggcgacatcgctactatcggctggcgggcggcgatgtcgccggattgctggaaaatatgatgaccatggcgggcaaaagcgcagtgccgctgaccacgcgaacgccgggaacgctgcgtatggcgcgtacctgctacgatcatctggcgggtgaagtggccgtcgccatctatgattttctgcagcagcaagcgtggctcacggcaaatggcaccgcgcttaccgcggcaggggaggcgcatttcgcccgcttaggtattacgtgcgatagcggatcccgccgcaaagtatgctgcgcctgcctcgactggagcgagcgccgttttcatctgggcggtgccgcgggcgctgccctgctgcagtggggcgtgcaaaaaggttggtttatgccggtcccgggctatcgcgaagtgacaatcagcgagcctgggaagcgagcgctgcgtcagcactttggcctggcgctgtagacccggcgacaggatacccgttcagcagtgattcatattgacgatttgcttatgcatcacctgcgagctattcattcccagctttttcataatgtgaatgcggtggctgtgtaccgtcttatgatcgatattcagcagcgaggcaattcgcttgttgttattgcaggcgataataagttccagtacctgcagctctctggcggtcagctttcgctgcgtgcgcaaataccggggctgcggagtttcatcctgcgttctggtaattgccgaaaatgcgtctaaagaagatttttccgtcaggattaacaggttttccagatcgattaattcccggcacagattggcgatatcgctttttaccatcaataccaacagtgtacagcgcgagaaatgaaagcgcagtttgttgagtaatacgaccgtatcggcggcggatatatccttgtggatcatattgaagatcaccgtctcagccaggggcgcgacgcccccttgcacgatgtcctgataactggcctgggtgatatcctggtgaatatcgctcagataatcatgaatagattggccaatgatattgtcgtcagtgtacagcaagatattgttcaagggcattaaactctcttcttacgcttggcttccagaatcaaatcgatcagcgttttttctattttcttcctgtcatcgctgcggcggaacttaaactggcaggaaatctgatagtagttttccggactcttttcttcgctatccagcgtgaccatcgccacgttcttgataatcagatcaacggtgatttcgccatattcagccagagacagaatggcgtttttcagcgttgagttgttggcaaggaatttcagatttggactttgcgcaatcagcgcgcagccaccatctgaaatatctttgatatcaaaagcatagttttcgccatttttatggcgcccatgacaaaagaaatcattctcatcgcgtaaacgaaatcgcggatctcgtcgtctttgtacaacctggatgcattccggtaacgcaaatgccaccttattgctattctccgctccgccagcggaattcttctgccgctgggaggtgaactcgatctttcctgaatcactatgcagaataaatttgaatttattccccgcagggattttgctatcgctctggatatggaattcggcaaaatctacacgcgcaatctgagtactgatgcttttgttattaaagaaaatttctatctctgtttgctttctctgttcctctctgaaaatagcaatgatttcatacttactggtttttatcgttccctctatcatgggtaatccttgttgaatcgttactgtgcatagttaattttttttacagcaatagcgacatactgattatgttaaccagatgtttttgtgaacgttcgatgatattgactatctttgtagccaaattgatttgtataaacgtcgaagccgatattgttttttcctgtaatcaagagtgttaacaaaaaccatggaacaatacaaacgacaacagcctcccaattaggaggcctaagaaataacgtaactcaatgcaatttataaggttatttcctcgacgaggaatcagcataacccgatttgtaggatatatagtgccagcagagatggcctaattccagcttaatattaaggggatagcccttcacggcaaacgccgtaaaggggggagttgacgccatcaaccgctgatgctatccagcttcgccagtgctccggcggggagggtaagcgttgcagcggcgagattttcccgtaaatgcgccaccgatgaggtgcccggaatcagcaaaatattcggcgagcgctgcagtaaccacgccagcgccacctgcatcggcgtggcgtcgagcatggcggcaacctcgttaagctcttgcgcctgtagcggcgtaaaaccgcccagcgggaagaacggcacgtaggcgatgttttgctgcgccagcgcgtcgattaacgcgtcgtcaccgcggttagcgatgttgtactggttttgcacgcagacgatgggcgtcagcttctgcgcatcggcaacctgtctggcggtgacgttactcagaccgatgtgacgtatcagaccgcgggcttttagttccagtaaggtcgttagcggttcctccagcgaaccctccaccgggccgtgggtgccgagcatgctgcgcagattgaccacctccagcctctccaggccgaggttacgcaggttatcttcgacggcctgggtgagttccgccggcgacatcgctggtagccaattgcctttctcatcgcggcgggcgctgaccttggtgacgatacacaagtcgtcgctatagggatgcagcgcctgacgaattagctgattggtgatatgcgggccgtagaaatctgaggtatcgatatgattcaccccggcggcgacggcttcttgcagaacgcgaatggcggcgtcgggatcttttggcggcccgaacacgccggggccggcgagctgcatggcgccgtatccaagccggtaaacctgacggtcgcctaaggtcatgaccccggataatgttacgctggacataatgactccctccgatgataggcaaggagtaagtgtaatcccgtcagggagaagcgatgggcgagaatgttggcagaacgtgcggcgacgctgaaggcgtcgccgcgagagcgatttaactgaagaacatcaccgagacgcagagcaggccgacgattaaggtaatgagattacccagcgaacggtagggcttgagcgccggaatgatatacgtcgacaacgtcggcatgatgaacagaatcatggcgataagcgggccgctgatggcgtaaatcatcgagatggcgttcggattgataaagcagacgataaaggtcagcgccgagaccagcataatcgacatggcgcggttaaaggcgcggctcttacgaatgccgagctggccgagcgaggttttaacgatttcgctggcgccttcgatcaccccaaaataggtgccgaggaacgatttcgacatcgcgaccaccgcgacgataatgccggtcactgcaagccagcccggcgcgcccggcgccatggagagcgcagagagaatcgtcaccccttcattacgcgcggcttcgatgtacggcagcggaatggacagcaggcaactgaagacaaaaaacagcacgctggcgcagatgatggtgtaggccaccttcatgatttttttgcatttacccatggccagctcaccatatttctcctgctgatcgatagcgaaggtcgaaataatcggcgtatggctaaaagcgaaaaccatcacgggaatcgagatccagatttggtgccaggtctttgcgttcagctgcatctgactggtgaggtgttccggttgccagctgccaatcaggtagatggagaggaacaggaaacagccaatcagcgggaagacgaggaatcccatcactttgatggtcatatgacgccccatcaggaagatcagattcagtaccagcaccacggcgaggctcagcagagcgcgtacgccaggagtcatcgccacgtgtctcgccagttgttcagccagcgaattagtgattgccacggcgtagatcaggatcactacgaagaaggcgagaaagtacaggctggtgatcagattgccgacttttttgccgtagtaatgattgaccgcgccggtgatcccttcaccggccgccactttggccgacaggatgaattgacacagcgctttgtgcggccagtaggttaacggccaggcaaccaaagcggtaaggaacagcacgatggcgccggccgaaccgagttgaatcggcaggaatagggtgccggcgcctacggcagtgccatatagagcaaaactccatagagtttcttctttagaccaaattttagacattatgcgaatttatcaaccgtataacccaaaaaaaggagtgcaatttaccacatttatgaatcgtttgcggtgatagttttcggcgataaataaacctgcggatcgccaaagggttaggcgatccgcgcgatcgagaacgttaactattcggcagactctgcggctggcgatacttcaggacgcgcacgcgcagcgtatcccacgcccagttaaagaacatggtgtagggcaggaagaacagcataaagccgatttccagcataaatgcctgcaccagcgacacgccaagcaccagcgcgacgacggtgacgccgatgatgataaagccgcactcaaagccgatggcgtgcagcgcgcgcacccgcagcgtacgcgccaggcgtgaaaccggccacagacggtcgaaggcggcgttatagatcaggttccagaccatcgccatggtggcgagcaaaatggccaagccgcccatttcgaccaccgatcgttgcattagccaggcggcggtgggggccagaattaacgtggcgagaccttcaaagcttaccgcgtggagtacgcgttccagcagtgtcttacgctgcaggtgattggttttcatttttggatacctcttgtcagttctgtcatccagatttacccggcattttatggaaaaatgtgataaacaaaagatagattccatcgataaagtagatagtttatgcactattctcccgaagccctcaccgcctttgtagaagccgccgccagcggttcgttctccgccgccgcccggcggatgcgtaaaagccagtccaccatcagtaccgcgatttcgaatcttgaaaccgacctggggttgactctgttcgatcgttccactcgccagccgacgctaaccgcgcagggcgagcaggtgctgggctatgtgaaagcaatactggccgccagttcgcggctggatgagctcgccagttcgttatccggcaataccgaaccgcggctgaccttcgtcttgtcggataccctgcacccggatgtactggaggatttgctggaacagttcgatcggcgttttccgcataccgagtttgaatgtctgattggcgaagatgaagacgtggtggatctgctgcaaaaagagcgcgctcaggtggggcttatcgaagcccgggacagctatccgatggagatcggcagcatgcgcctgccgttgcaaacggcgatggggatttatgttgcgccggggcatccgctggccggtcaggggcgggttttctgggatgatctgcacggctggcgtgaactgcggcttagcacttatcttgagagcgcgccggacccctcgcgcggccaggtatggtcggcgcccaactatttgctgctgctgagtatggcggtgcagggctttggctggtgcattttgccctgcgcgctggtggaagagttcgccggtagcggcaagcttaaagcgttgaatatcgccggctggccgcggtcgatctcggtggatctgctatggaacaagcgtacgccgctgggggaagcgggcagctggctgcgccaacatcttgaagggcaaggccgcgagtcgtgatggcgaactttgtgaacttcctcactttttttaaacaattgcgaaattttttgataacaattctctactataacggcatctattgatggttctttgcgcagaaggtaaaggatgaaagatgtcgtgatcgtcggcgcgttgcgtacgcctatcggctgttttcagggaacgctggcgcgtcactcggcggtggaattgggcagcgtggtggtgaaggcgttagtcgagcggagcggaatcgatccgcagtgcattgatgaagtgatcctcggtcaggtgctgactgcgggcaccgggcagaatccggcgcgtcagtcggcgatccgcggcgggctgccgaataccgtttcggctatcaccatcaacgacgtttgcggctccgggctgaaagcgctgcacctggcgactcaggccatccaatgcggcgaagcggatgtagtgatcgccggcggccaggaaaacatgagccgcgcgccgcatgtgcttaccgacagccgaaccggcgcgcagctgggcaatagccagcttatcgacagcctggtgcatgatgggctgtgggacgctttcaatgactaccatatgggcgtaacggcggaaaatctggcgcgggagtatgggatcagccgtgaactacaggacgcctgggcgcttagctcgcagcaaaaagcgcggcgggcgatagactccgggcggtttcgcgatgaaatcgtgccggtcgccaccgagcataacggcagtcaacggctggtggataccgacgagcagccgcggatggatgccagcgctgaagggttagccagcctgatgcccaccttcgaccagcttgggtcggtgaccgcgggtaatgcatcgagtattaacgatggcgcggcggcggtaatgatgatgagcgaatcaaaggcccaggagctggggctgccgattctggcgcgcattcgcgccttcgccagcgtcggcgtcgatccggcgctaatgggtattgccccggtacatgctacccggcgctgccttgagcgcgcgggctggcagctggatgaggttgacttaatcgaagctaatgaagcttttgccgcccaggcgatctccgttggcagagtgctggagtgggatgaacggcgggttaacgtaaacggcggggctatcgccctgggccatccgattggcgcgtccggctgccgtattctggtgtcgctggtacatgaaatgatcaagcgcgatgcgcgtaaagggctcgcgacgctgtgtatcggcggcggtcagggcgttgcgctggcggtggagcgcgcataatacgatctcgcgccgtcttcggcgcgatgtccaacttcctcgccgatcttcttttcttcgtttttccctccgattttctctcttcgcggttatttttcaaagataacctaactcactgtatttatagcttttgtacaggttgctagctcctggcgatgtgatccgttttgcgtttttatcatttttaatcataaaaaatgaaacgttgttttaattgtcgttgaaaatgatttttcagcggtctactatgtgaccatcagcaaaacggaactctgttttatttttatgatggggatgccccaggagttcttcttagcctcagaaccttgcctgtggtgagcaggccgtgaaagaaaggaaccagatatgattcttgatgcattctctcttcaggggaaagtcgcggtagtgaccggctgcgacaccggtttaggccagggcatggcggttgggctggcggaagcgggctgcgatatcgtcggtattaatatcgttgagccgacggaaaccatcgagcgcgttaccgcgctggggcgtcgttttttgagcctcaccgctgacctgcggcagatagatggtattccgcagttgcttgagcgcgcggtggcggaatttggccacatcgatattctggtcaataacgcggggctaatccgccgtcaggatgctatcgaattcagcgagaaggactgggatgacgtgatgaacctgaacatcaaaagcgtctttttcatgtctcaggccgcggcgaagcacttcatcgcccagggtaacggcggcaagatcatcaatattgcctccatgctgtcgttccagggcgggatccgcgtgccgtcctacaccgcctcgaaaagcggcgtcatgggcgtaactcgcctgctggccaatgaatgggcaaagcataatatcaatgttaacgccattgcccccggctacatggcaactaacaatacccagcagttacgcgccgatgaacagcgcagcgcggaaattctcgaccgtatcccggccggccgctggggcctgccgagcgatttaatggggccggtggtgtttctcgcctccagcgcatccaattacatcaacggctacaccgtggcggtagatggcggttggctggcgcgctaacagacatagtcgaacaacccgccaaccggcgggttgttttctgaacaatgatcgtccatatcatgagatttaaataatccatactcgttagtaatggaaaataaaatactcgccattcatcagggttgttttgacgatcggacagcattttttgcataagataaagtttaatgtccatcacaaaaacaatgctgccagccgttttatccatatcttcgccatctcccgcctgacaccttagccctgcgatcccgtactttcactgcacgcatactctgttgaggcaggaaaaaaatgacttcattgaccaccgatccgggtttactccccaatgcgcagcgcaacacccggcgcatgaaccagtttgtctccattgccgccgcggtggcgggtttgttattcggccttgatatcggcgtgattgccggggcgctacctttcatcaccgatcatttcgttttatccagccgtctgcaggagtgggtggtcagcagtatgatgcttggcgcggcgatcggcgcgctgttcaacggctggctctctttccgtcttggccgtaaatacagtttgatggttggcgcggtgctatttgtggcgggctctatcggctcggcattcgccaccagcgtcgagatgctgctggcggcgcgtattgtccttggcgtcgccgtcggtatcgcctcttataccgcgccgctctatctttctgaaatggcaagcgaaaacgttcgcggcaagatgatcagcatgtatcagttgatggtcacgcttggcatcgtgctggccttcttatctgataccgccttcagctacagcggcaactggcgggcgatgcttggcgtgctggcgctgccggcggtattgctgattatcctggtggtgttcctgcctaacagtccgcgctggctggcggaaaaaggccgccatatcgaggccgaagaagtgctgcgcatgctgcgcgatacctcggaaaaggcgcgcgatgagctgaatgaaatccgcgaaagcctgaagctcaagcagggcggctgggcgctgttcaaagtgaaccgcaacgtgcgtcgggcggtattccttggcatgttattgcaggcgatgcagcagtttaccggcatgaatatcatcatgtattacgcgccgcggatcttcaaaatggccggctttaccaccaccgagcagcagatgatcgccacgctggtggtcggcctgaccttcatgttcgccacctttatcgcggtgtttaccgttgataaggccgggcgtaaaccggcattgaaaatcggctttagcgtgatggcgttgggcaccctggtactgggctactgcctgatgcagtttgataacggtaccgccggcagcggcctctcctggctatcggtgggaatgaccatgatgtgtattgccggatacgcgatgagcgccgcgccggttgtgtggatcctctgctctgagatccagccgctgaaatgccgcgacttcggcatcacctgttcgaccaccaccaactgggtgtcgaacatgattattggcgcgaccttcctgacgctgctggacgcgattggcgcggcaggcacgttctggctctataccgcgctgaacgtggcgtttatcggcgtgaccttctggctgatcccggaaaccaaaaacgtgacgcttgaacatatcgaacgcaagctgatgtccggggaaaagctgcgtaacatcggcaactgatcacacggattcgcgcggcagccacgggctgggaaccttaatggtatcccgatggctgtcgccgttaataatatgcagggcgctcaggcggccaatttcataatgcggtaactgcaccgttgacagcggcggcaggaacagatcgccaatccccaccatgttgtcataacccaccaccgccacatcttcagggattcgcaagccctgcgccagcaacgtctggtagaccataaaagcgatacgatcgttaccgcacactacggaatcaaaccgcggtttaccctgatcaatatgggccagcagctggccgggaatatcgcgatagtgttcgtcaccgtaggtcatatagcagtgatcgagcgtatccggatcgacctgcgcctcgcggcaggcgcgttccatcccctgtcggcggcgtatcgtcgccagatgcctggccggaagatgcaaacagagcgggcggcgatagccggcggccagcagcgctttcaccgcgtcgtactggccttgctcatcatccggaatatagctggcgacgttctcgttcaggctttcgcagttggccagcacgcagggcagcgtcaacaatttcgccggtagcggaacctggcgtagccccatggtggtgtaaatgatgccgtccgggcggtgggaaagtagcaggtcaaggatggcatctggattgtcatccgagaacatgttaaccacaaagctgttccagccgtgggcccgcgccgtctcttcgatagagagcgttatctctactgagaatggagtggtcaccgtatccagcgccagcacgccgatggtgctcggcgttgcccgggcgccgcgaattttcttcgccgacaggtcggggacgtaattggtctgttcgatagccgcctgtacgcgggcgagcgtttccgccttcaggcgctccgggctgttcagcgcgcgggataccgtcatcagtgagacgttggctagcttcgctacatctttcagggatgccatggtgattactccggtatacaactaagtcgctgatgtaaaaggatcatacgatagtctatcccagcctgatggtgaagcatggcgaggaatagttgatcgcgatctcatcttcattatgttaacgttaacttttgtgattaacatcatgaatcgtcacaaaaccagatgagagttgttttttgttaacgttaccatttgcgcattactccaacacgagaatgtcatgatgaagatgcatcactctcacagctaccccttactcagtgccttactgtttttcttttttgttacctggtcttcttccggctcgctgctttccatctggctacatcaggaagtggggctgaaagccggggataccggcattatctacgcggtgctgtcggtctcggcgctattcgcccagatttgctacggctttatccaggataaactggggctgcgcaaaaatttactctggtatatcacggttttactgatcctttccggcccggcctatctgctgtttggctatctgctgaaaatcaacgtgctgctcggcagtatttttggcggcatctatatcggcctgacctttaacggcggcattggcgtgctggagtcctataccgagcgcgtagcgcggcaaagccagtttgaattcggcaaagcgcggatgtggggatcgctgggctgggcggtggcgacctttttcgccgggctgctgttcaacattaacccacagctgaacttcgccgtcgccagctgttctggtctggttttcttcatgctgctggcgcggcttaaggtctcttcagcgccacacgccatgcaggaggcggtcagtggcggtaaagtcacgctggaagacgcgctgcgcctgctgacgctgccgcgcttttgggcgctggtgtttttcgtcgttggcacctgtatttacggcgtttacgaccagcagttcccggtctacttctcctcgcagtttgccacgctccatgaagggaacgccatgtatggctatctcaactccttccaggtgttcctcgaagcggcgggaatgttctgcgccccgtggctggtcaatcgcatcggcgcgaaaaacggcctgatcttcgccggcatggtgatggcgatgcgcatggtggcctccgggctggtggaaggcccggttctgatctcgattacgaaactgctgcacgccgtggaattgccggtgctgctggtgtccatcttcaaatacaacagcctgaactttgataaacgcctttcttccaccctgtacctggttggtttcgcctgcaccagttcggtcatcgccaccgtactgtcgccgctggcgggctatagctacgaaaaatacggcttcgccgactcctatctgatcatgggactgctggtgttctgcaccaccttcatctccatcttcctgctgcgatccaataagccctcttcggattcgctcatgtcgcagccatccactatctgactgaaaagagaaatgaatatgatctattccattagtaacgcggagcgggaactgcaggcgaaaagcgtggatctcaacccgcgctggtatccgcgttatcacctggctgcccgtgccggctggatcaacgaccccaacgggctggtatggttcgacggctggtaccatgcgttttatcagcaccacccgtattcaaaccagtgggggccgatgcactggggccacgcgcgcagcaaggaccttgtacagtgggaacacctgccggtggcgctggcgccggaagggccggaagataaagacggctgcttctccggctcggcggtggttgatggcgatacgctggcgctcatctacaccggccataaatttcatggcgatcccgcggatgaaaataacctgtaccaggtgcagtgcctggcgaccagccgcgacggcatccattttgagcgccaggggatggttatcgataccccgccggggatgcaccattttcgtgacccgaaagtatggcgtgaaggtgaaagctggtacatggtggtcggcgcgcgggtagacgacgtcggccaggtgcggttgtaccgttctgacgacctgcgccactggcaggacgccggtattcttgcccaggccgaagcggggatgggctacatgtgggagtgcccggatttctttgaactcgatggcaagcgggtgctgatgttctcgccgcaggggatggccgcggacggctttgcccggcgcaatttattccagagcggctatctgctgggggactggcagccggggcaaccttttgtccgcgaagaggcgtttgtcgaactcgacagcggtcacgatttctatgcgccgcaaagtttgctcacccccgatggccgacgaattgtaatcggctggctggatatgtgggagtcgccgctgccggagcagcaggacggttgggccggcatgctgtcgctgccgcgcgagttaagcctcggtgccgataatcggctgttgatgcgtccggcaaaagaggtggaagtcctgcgccgcgactggttcccgtggccggtcagttcgttgaagaatcagcaactgacgatggtagagcattgtgaaaccatggaggtcaatctgcattgggatatggccaatagctgcgccgagcaatacggtttgagctttggcgaagggctgaaggtatatgtcgacaatcagatgcagcgtctggtgctggagcgtcgctatccgcaatatggtttgtgcggcacccgcagcgttccgttaccagccggttcggcgctgaagctgcggctatttttcgatagctcatccgttgaggttttcgtcaatgacggagaagcctgcctcagcagccgtatttatcctgatgccaagcgccgggaattagctttattttcctggagcggtagtgcggcattaattgatggcggagcatggaacctctaattaaataatcattaacctgaataacccgtaagcaaacgctggcgggttatttaatattcaccaaaataataaaacaatacctttaatatataataagcaggatctgacgatgaataaaatctgggttggatgtcttatctcgtctttatttattcccgccgccggcgcgcagcaaacgctttcgcttgaggagcgtctggcgcagatggagcagcgcttaaaagccaccgagcagcgggcgcaaaacgccgaggcggaaatccgcgaactgaagcagcaggagcgcgcgacggctcaaagcagcgcgcctgcgcccgcgacggttgccgcgcccgcgctggcggtgaataaagatgtcgatttaaaattttacggtgatgttgaatttaatatggatggcgccagccgaaccggcagcctgacctcggtaaaaaccagcgcgaataagaactgggcgccgggggataaagagcgctgggatattaatgggcgtattttgttaggattcgatggtttacgtaaaggcgctaatgggaaatactccggctttagcgtacaaccgctggcggatatgaccggaaaaatgaatcttgatgatgccgtatttttctttggtcaggaaaatgactggaaaataaaaatcgggcgctttgaagcttacgatatgttcccgctgaatcaggatacgtttattgaatattctggtaataccgccaacgatctctatagcgacggttacggttatatctacatgatgaaagaggggcgcgggcgtagcagcagcggcggtaatttcctgctgagcaaatacctcgataactggtactttgagctcaacacgctggtggaagacggtagctcgctgtttgtcgatcaaaactaccacggcaacgcgctcgaaaatcataaaaacgtggtctatgtgcggccggtggcggcctggcagtccggcccgtggtcagtggcggcggcggttgagagtaatctggtgaacaatgcctatggctatcaaaaccagaacggacgctgggtcgatcagtcaagccgtaccggctacggcctgaccatgagctggaatacgctgaaaaccgatgccgaggatggcatggtggtgaatctcagcaccgcttatctggacgcggcggatgaagaggatttcagcgccggtatcaacgcgctgtggcatcgcgtcgagctgggatatatctacgcgcacaacaaaatcgaccagttcaacatggcgggggtcagcggcgagtgcgatggcgactgcgcgattctgacgccgggccgctatgacatccacacgatccatgcctcctggcaactgccgaatatcatggatatgccgaactttaatatttatctcggcgcctatgcctcatggctggattcgtcagcccagcagagcgggaacgacgacgaacgctacggcgcgcgcgtgcgctttaaatatttcttctgatggggtcgccgcccaacagcaacagtggaaagttatcggcaggtttgcttcactggagcaaaccataaaggagcagataatgaaaaccatcggcctgctgggcggcatgagctgggaatccaccattccctattaccggttaatcaatgaaggcattaaagcgcggctcggcggcctgcattccgccagcctgttgctacatagtgttgattttcatgagattgaagcctgccagtcggcaggggagtgggatcgcgccggcgagatcctcgccgcggccgcgctggggctacagcaggccggcgccgagggcatcgtgctgtgcaccaacaccatgcataaggtggctgatgcgattgaagcccgctgcgaggtgccgttcctgcatatcgccgacgccaccgggcgggctatcagcgctaaaggccagcgtcgggtcgcgctattgggcacccgctacaccatggagcaggatttttatcgcggccgtctgcagcagcagtttgccattgagacgctgatcccgcaggctgacgatcgggcgcgcatcaatcaaattatttttgatgagctgtgcctcggcacctttagcgacgcctcgcgcgactattatctgcaggtcatcaaggcgctggcggcgcagggcgcgcaaggcgttatcttcggctgcaccgaaatcggcctgctggtaccggaaacgagtagtccgctgccggtatttgataccgcggcgatccatgccgctgacgcggtggaatttatgctctcttaagtaccgccgccagcggctgttcgatacgcggcaggctggtttgcagatgctggacaaaggcgtcgaccagcgcggaaccggggcgatgtagtgggcggattaggctgacggtaaagggcacatcgacgctgaagcgccgcaccaccacgccgctctcagcgtagtcgagggcggtgagcgggttaaccaccgaaatgcccgcaccagcgcgcaccagcgcgcagatcgacgccgcgctgtgggtttcaaccaccatccgtcttttcacctggtgctccataaatagcgcatcaagcagctgacgatagctgtcggtgcgcgacaggctgatatagttttcaccgtggaagtcggcgggggtgagttcggttttcgcggccagcgggtgattttgtggcagcacgcagacttcatttaaggtcagcagcggcgtgcgctcggtgccggccggcgtatgcagcgtttccgttaaccccaaatcatggcgctgggcggacagccactcctccagcagcggcgactcctgcggcacgatctgcaggctgacgtccggatagcgcgcgaggaacggctgcagcagcagcggcagaaatgactgcgaaaagaccggcagacaggctaccgacagctccccctggcggaattcgcgcaggctttccgcggcgctaacgatgcgatccagcccgtaccatgaacgctgtacttcttcaaacagtcgcagcccttgcaccgtcggctgcagacggccgcgggcgcgctcaaacagctttaagccgagtactttctcaaaacgcgccagctcacggctgaccgtcggctgcgaggtgtgcagcatccgcgccgcttcggtcaggttgccggtggtcatcaccgcgtggaaaatctcaatatggcgtaagttgacggcaggcatgggcggttcccggttagcatcagatagccatatcatttttgcatagactcgcgataaaacgatattttttattctcttcatgctgtggcgtaatcggaaaaaacatcgacaaacacacgtacgcaccggagtccttatgccacgctcgctaaacgccaccgataccgatctgaccgctgacaatctactgcgcctgcccgctgagttcggctgcccggtatgggtctatgacgcgcagattatccgccgtcagattgcccaacttagccaatttgacgtggtgcgttttgcgcagaaggcctgctccaatattcatattctgcgtctgatgcgcgagcagggcgtgaaggtggattcggtgtcgcttggcgagatcgaacgcgcgctggcggcaggttacgatcccgtgcagcatccggacgatatcgtctttaccgccgatctgatcgatcgtgcgacccttgagcgggtgaaagcattacagatcccagtgaatgccggatctgtggatatgcttagccaactgggcgaagtctcgccgggccaccgcgtctggctacgggtcaacccgggatttggtcatggccacagccagaagaccaataccggcggcgaaaacagcaaacacggtatctggttcagccagctgccgcaggcgctggaggtgattcgccgccattcgctgcagctggtcggcatccatatgcatatcggctccggcgttgattatggccatcttgagcaagtatgcggcgcgatggtgcgccaggtggtggagtttggtcaggatctgcaggcgatctccgccggcggcggtttatcgatcccatatcacgaaggcgaagaggcgatcgataccgatcactattttggcctgtggaatgcggcgcgcgagcagatcgccaaacatctggggcatccggtaaagctggagatcgaaccggggcgtttcctggtggcggagtccggcgtgctggtatcgcaggtgcgtagcgtgaaagagatgggcagccgccacttcgtgctgatcgacgccggctttaacgatctgatgcgcccggccatgtacggcagctatcatcatattaccgcgctggcggcggacgggcgcgacctgagcggcgaaccgcagctggaaaccgtggtcgcggggccgctgtgcgaatccggcgacgtctttacccaacaggagggcggtaaagtggaaactcgcctgctgccggcggtggcgccgggcgattacctggtgctgcacgacaccggcgcctacggcgcatcgatgtcttcaaactacaacagccgcccgctactaccggaagtgctgtttgataacggcagcgcgcgcctgattcgccgtcgccagaccattgaagaactgctggcgctggagcttatttaaagaatggccccgtcgtcaccgattcacgcagtaccagcgtaccggtgaacggcgggatggtttcgatcggctgttcgttggcgagcttaatcgcctggtcgatggcggtggtgatcatattgtcgatcggcagataaaccgttgataatccgggctccagccacttcgcgctaggagcgtcgtcaaagccgaagagcgatacgtcctgcgggatgcgcagccccgcctgatgcagcgctttcgaggcgcccaacgccatatcatcgttacaggagaacagcgcgctaaacggcgttttctcttctaataattcccgacacagctcataaccgcgggtcatcgttgaatcgccgtacttgacccgcgccggttcccacgcaattccgtgcttttccagggcgctgcggtagcccgccaggcgcgctttacccgttggggtatgcatcggcacggtcaggcaggcgatatcgcggtgcccttgggagatcagatagtcgacggcctgaaacgccgcttcctgctgttcgaagaacacgcagcgttcccgcgcctggctaacgtcgcggttaatcaccaccagcggcgtttcaatggtctcgataagcgacatgattttctgttcgctcatatggcgggtgtagagcacgatggcgtcgcactgacggtcggccaacatttgtaccgcttcttcttctcgttcgggcgcatcgtggccgtcggtgacgataagctgtttgccccaggcttccgtttggcgcgacgcctgttgcagcaagcggccaaagtaaaaaccgtcgaatgtcgataccaccagtccaatgctgttgctggtgcgattcgccagcgagcgggcgagaaaattaggccggtagcccagctcttccatcgctttgaatacctgttggcgggtactctcttttacctgacctgtgccgttcaacacgcgggaaaccgtcgctttcgagacgcctgcgcgtattgagacatccagcattgttgccattcgtcgattcctgataaccggtgatagggcgcagtttaccacagtcattcagagggatatgagcctgacgacggcaaagactatcgcgatcacgctttttgcggaaatcctgttgaaggcattttccgaccccggatgcgcgggcgcgagcggcgcgctagaattcatcgattcacagggggaaaaaatgcagattcaaccgttgtacgccgcgccgcagcatgggccgcaggtggcggagtggctatggcaggcttttgccggcgatgccttaccgcaggcgttttttagcagtattgttgaacatagccaaacgccgggggcgctgccgctgacctttatcgccaccgatggcgaggcgctgctgggtaccgtggggctgtggcgttgcgatttgataagccgtcaggatctgtttccatggatggcggcgctctttgtcgccgaaacggcgcgcgggcaggggctggccgggaagctgcagcggcacgtcatcgactatgcccgccagtacggttatccgcagctttatctctattccgcctgccgcgatttttatgagcgctttggctggcgctatatcggcgagggcctggattacccggccaccgccgtgagcctgtaccgctatgacttgtcactttccgcgggcgttatcaccgagtgacggcgcaccagcgtcgggctgaagaggtgagtgatttccggcgccggacgctgttctgctagtgccagggccagctccgccgcctgggtcgccatggtgacgatcggataacgtacggtggtcaggcgggggcgcacgtagcgcgagatcagcacatcatcgaagccaatcagcgaaatttcctgcggcacctcgataccgttatcgttgagcacccccatcgcgccggcggccattgaatcgttgtaacaggcgacggcggtaaagtttctgccgcggcctaatagctcggtcatcgccagctcgccgccgctttcgtcaggctcggcgaaggtgaccagccggtcattgacggccaggccgctctccttcagggcatcgtaataaccctgcagccggtcttcagcatcggaaatcgcgtggttggagcagatatagccaatgcggctgtggccctgctgaatcagatggcgcgtcgccagccaggcgccgtagcggtcatcgagcgccacgctgcgttgctcgaaacccggcacgatgcggttaatcaacaccatgccggggatctgtttcatcagccccgccagctcatcgtcggggatcattttggcgtgcaccaccagcgccgcgcagcggtgacggattagctgttcaatcgcctgacgttccttttgcacgttgtggtagccgttgccgataagcaaaaaattaccggtgctgtaggccacctgctcgacggctttgaccatcgcgccgaagaagggatcggaaacgtcgcccaccaccaggccgatggtttccgttgactgctgcgccagcgcgcgggcgttggcattggggtggtagttcagggtttccatcgccgccgtcaccgactgacgagaggcttcactcgcttttggcgagttgttgataacgcgtgagacggtagcgacggacactcctgcgagtcgggctacatccttaattgtcgccataccggaccttttttagggtaagcgtttacataatagttatgttacgggaaagcgcagcggattcaaggctaccgctattctggttgatacaaatgtgacgcagacagagattagcagtgacaaagttacacagcacaatgcgtgggatgcaacggtgaaaagagaattctcatctttgcttacactttgcgattagctgttgcgaatgttcgctggtttcgttgagtgatgcattgatactctggctatcccagaggtattgataggtggagtcaacgtcatgttgaccacttaattacaccaacctgcgcagatgcgcaggtttttttttgcctgttattcatgctgttacagatagcgagaatcgtaatacctggttgcacttaggctcattcccttgcgttttcgcgctggcgcgatcgcgggggaaaacgcgacaatcagggtcccagaggtattgattggtgagtttcttaagtacgcacttcgtactgattatcttgcaccggcctgcgcggatgcgcaggttttttttattctgaattttatcccccacactgcttttccccgccttctcatgtaacctgcttggattactaaatcagccacgcggagtcgttatgctgttgggattttttcgattactgttcaaaggattgtaccgggtgcgattgaccggagacactcaggcgctttatcaggaaaaagtattaataacgcccaatcatgtctcatttctcgacggtattttactggcgctctttctgcctgtgcggccggtgtttgcggtctatacgtcgattagccagcgctggtttatgcgggcgctgacgccgcttatcgactttgttccgctggaccccaccaaaccgatgtcaattaagcatctggtgcgcttgattgagcagggacgcccggtggttattttcccggaagggcgtatttcggtcagcggttcgctgatgaaaatctatgacggcgcggcgttcgtggcggcgaagtcgaaagcgaccattgtgccgctgcgaattgaaggcgccgaacttacgccattcagccgcctgaaggggctggtaaaacgccgcctgttcccgcgtattcagctccatttactgccgccgacgcatctgccgatgccggaggcgccgcgcgcccgcgatcggcgaaaaatcgccggcgaaatgctgcaccagatcatgatggaagcgcggatggcggtgcgcccgcgtgaaacgttatatgagtcgctactggcggcgcaggaccgctttggcgcgcgcaaaaactgcgtggaagatattaatttccagccggatacctaccgtaaactgttgaccaaaacactgttcgtcgcgcgtattctggaaaaatacagcgtgcagggcgagaaaatcggcctgatgctgcctaacgccggtatcagcgcggcggtgattttcggcgcgattgcccgcgggcgaatcccggcaatgatgaactataccgccggcgtcaaaggactcagcagcgcgattaccgccgcggaaatcaaaaccatttttacctcccgtaccttcctcgataagggcaaactctggcacctgcctgagcagttgactcaggtgcgctgggtgtttctggaagatctgaaaggcgatgtcaccaccgccgacaaactgtggatatttggccatttgctggcgccacgtctggcgcaggtcaagcagcagccggaagatgcggcgatgatcctctttacctccggctcggaggggaacccaaaaggggtggtgcatagccataaaagcctgctggctaacgtcgaacagattaaaaccatcgccgattttaccgccaacgaccgctttatgtcggcgctgccgcttttccactccttcggcctgacggtcggcctgctgacgccgctattcaccggcgcggaagtattcctctatccaagcccgctgcactatcgggtggtgccggagctggtttacgatcgtaactgtaccgttttgttcggcacctcaaccttcctcgccaactatgcccgctttgccaacccgtatgatttttatcgcctgcgctatgtggtggcaggggcggaaaaactgcaggacagcaccaagcagctgtggcaggacaaatttggtctgcgcatccttgaaggctacggcgtgaccgaatgcgcgccggtggtctccatcaacgtcccgatggcggcgaaagtcggcaccgtcgggcgtattcttccggggatggatgcccgattgctggcgatgccgggcatcgaacagggaggccgactgcagttaaaagggcctaacatcatgaaaggctatctgcgggtagaaaaccccggcgtgctggaagcgccgacggcggaaaaccagtacggtgaagtggaaagcggctggtacgacaccggcgatatcgtcgtctttgacgaacagggctacgtccgcattcagggccgcgccaagcgcttcgccaaaatcgccggcgagatggtctcgctggagatggtcgagcaggtcgctttggcggtctcgccagacaaaatgcacgccacggccattaagcaggacgccagcaaaggcgaggcgctggtgctgtttaccaccgataatgaactcaatcgcgaaaagctgttgcgctacgcacgtgaacatggcgtaccggaactggcggtgccgcgcgatattcgttggctgaaacagctgccggtactgggcagcggcaagccggactttgtcaccctgaaaggcatggtagaagaggcggagcattcaaatgagtgagtcagtgcacactaacgcttcactgtactcgaaagggatgatggcggtgatctgcgcccagttcctgtcggccttcggcgataatgcgctgctgttcgccaccctggcgctgatgaaacagctctactatccggagtggagccagccggtgttgcagatgttgtttgtgggcgcttacattctctttgcgccgtttgttggtcagtttgccgatagcttcgccaaaggccgggtgatgatggtcgctaacggcctgaagctgctcggcgccgggtgtatttgctttggcgtcaatccgtttatcggttatacgctggtgggtgttggcgcggcggcctattcgccggcgaaatacggtattctgggcgaactgaccaccggcgataagttagtgaaggctaacggactgatggagtcgtcgaccatcgcggcgatcctgctggggtcgatggcgggcggcattcttgcggactggcacgtgctggcggcgcttatcgtttgtgcgctggtttatggcggcgcggtggtcgctaacctgtggatcccgaaactaccggcggctcgtcctgggcagtcgtggcgtttcaggccgatgacccatagcttcttcagcgcctgtaaaacgctgtggcgtaatagcgaaacgcgtttctcgttgatgggcaccagcttgttttggggcgcgggggtgacgctgcgctttctgctggtgatttgggtgcccgtagcgcttgggatcaccagcaacgcgatgccgacctacctcaatgcgatggtcgccgtcgggattgtggttggcgctggcgcggcggcgaagctggtaacgctggaaaccgtctcgcgctgtatgcccgccgggatattgattggcgtcgcggtgattgccttcgcggtgcagcagtcgctattgccagcatttggcctgctgctactgctcggtgtgtgcggcggcttctttattgtgccgctgaacgcgctgctgcaggagcgcgggaaacataccgttggcgcaggtaacgccattgcggtacagaacctcggcgaaaacgtggcgatgctgctcatgctggggctgtactcgctggcggtcagcgttgggatcccgccggttggcgtggggatagggtttggcgcggtctttgcgctagccatcgccgcattgtggtggtggggacggcgtaaataacgccccggagggggacggactcacaaatgtctgctctcccgtagcccgggtaaggcgtttacgccgctacccgggttttaccctcttaaggcgccgggtaggtatataccttatgcaccgcttcaatctccgctaacacctcttcgctcagctcaagatgcaaactttcgacgttggtcttgagctgctccatggtcgtggccccgagcagggtgctggcgacaaacggctggcggcgcacaaaggccaacgccatttgcgccggatcgagattgtggcgtttggcaatgtccacataagcggccaccgctttctgcgcctgctcgccgctgtagcgggtaaagcggctgaatagcgtattgcgtgcgccagccggctgcgcgccgttgaggtacttaccggtcagcgtaccgaacgccaggcatgaatacgccagcagctctacgccctcatattggctcacttccgccagccccacttcgtagctgcggttaagcaggctgtacgggttttgaatcgtgacgatgcgcggcaggtcgtgcttatcggccaggtgcagatagcgcatgacgccaaaggcggtttcgttagagacgccgatatagcgaattttcccggcgcgctggaattcggtgagggcttccagcgtatcgagcagggtgaccaccggcgcggagtcgctccaggtatagcccagcttgccgaaacagttggtctggcgctgtggccaatgtacctgatagaggtcgagataatcggtttgcagacgcttgaggctgtcgtgcagcgcgtcgcgaatgtttttgcgatccagcgcgtgatttgggcgaatgctgctgtcgttattgcgcgccgggccgctgactttagaggcgataaccagcttttcgcggttgccgcgtttcgccagccagttgccgacgtaggtttcggtcagaccctgggtttccgggcgcggcgggacaggatacatttcggcgacatcaatcaggttaattccctgacttacggcgtagtcgagctgttcatgagcgtcggcctcgctattttgttcaccaaacgtcattgtgcccagccctagcgtgctgatttcaagagaactgtgtgggatacggtgatactgcatagccggcttccttatttttatcaacaaggtcaggagtttcccgacaaaactatctccccacaaacttcaaagcgcttgcaggttgatgggaataacaacatggcagagggagagaaaaagagaaagggaaaatatcaaaaaagccgggtctggagatcctgaagggggttgccctgggatatagcagggggatcccgactcttttctgttgctgtggttgtcggaaattgtgcttttaaccgacgaaaagcttaacgcttaataatttgtgacacgtcgtcgcggttgatctgcattttattgccttgctgatcttcgtagcttatcaaaccggtgtcatcgtcaaccgccggtttaccgtcggtaagaatcatacgtccgtcttttgtcgccatgacataatcgctgctgcaaccggaaaccgagaacgccagtcctacggcggaaatcaatactgcccattttttcatcgtcattacctcacttatggccgcacctcgtaccagtatattaatagcctgatttgtgagacataaaaagcagtaaagtcttaaaaagaattgcagcccgcttccggactgcaattttgtggcttacagcgggtttttcttattgcgcatcaggttgagagtttcgaccgcaatggagaagaacatcgcgaagtagatgtaacctttcggcacatgcacatcgaagctctccagcatcagggtgaaaccgaccaggatcagaaacgacaacgccaacattttgaccgacgggtgacggtcaacgaagtcgccgatcggacgtgcggcaaacatcatcaccccaaccgcaatcaccaccgcggccatcataatgaacagatgatcggagaggccgacggcggtgatgactgaatcaagactgaagatgatatccagcagcatgatctgcacgatggcgccaaagaaggagtggacgttgcttttaagaccttcttcctcgccttcaatcgattcgtggatctctttactcgctttccagatcaggaacaggccaccgagcagcaggatcagatcgcgaaacgagatctcctgaccgaatacggtgaagagtggattggtgagcttaacgacccaggcgatagacgccagcaggccgagacgcatcagcattgcacccatcagcccgatacgccgcgcatgggcgcgttgggcggtgggcaacttagcgacaaccagagagagaaaaataatattatcgatcccgagaacgatctccagcagcgtcagcgtgccgagcgccagccaggcgttaggatcggttatccatgcaaataacattgttcaaagtcctgcaaaaataaagtcgtaattatatgcaggcgttgcggcagaacaaaaaattattcatgccctaatagaaaatgacgcgccagcagtgcggcggtaaagttctttttcagataaaagccgcgcggcaaagtgaggattggctcgccgtgggcgccgatcgcttccgttagcgccttgctgttggccgctttagggcgcagttgcaatacctcgccgtggcgggcggtgatgcgttcaacctggccgagtacgatcaaatccatcaactcttcccagtccatgcgcagctggcgatcttcttcctcgtctggcgtccataatagcggcgcgccgacgcggcgttgcgcgagcgggatctcgcgttcgccttctaccgggatccacaatacgcgctgtagcttatgccgcacgtggctgctttcccaggtcacgccgctattgccggttagcggcgccacgcaaacaaatgtggtctccagaggacggccctgacggtcaatggggatggttttcagctccacgcctaaggcggcgaaatcctgctccggtttgctcccggcgctggcgcccagccaaatttccagcagaatgccaatccagcctttatcgcgtttcaaatcgcggggaatggggacccccgccagcgccgccagttcacccagcgaataacccgccagccgctgggcctgagcaagaagttgctcctgactttgcggcggagcggtaagtggagcaatggctggcatgatggaaaacctctggttaaaaaagtgagcgctatttttatgcgttgtggatagagtttacctttttatgggtaactataccaatgtgatgatttatatatgttttttgtcccgtttcttcgcttgtgaaaacagtgaaaacgggttttccagaactggtcactgacaatgaacaggatcttacaccatgttatccacagaaaaatgggataactggggaaaagccccactactggttcgatttacagccttgacgtgcgacgaaaatcgaatttttagacaaaatgtgcccgacgagtgtgctttatctgtggataaaagcggcattgttcgatctttcatcagttgccggatcgcatatgtgatgatcatcacgttatgctgtaatttgtcggtgtgaactatgataacttaatgaatagtatgtcattattaagaagccctatctctacgtcgttcggactactctgggttttccctggttaattccgtacttcttcacaactctatccacagaaaaagtgaataaaatggcccggggatggcgttcactgtttataactcgggtgattactgtgagttattcaaatgttattcgttatcacgccacacagagagtggtttaccgtttccaatgagtgtgaaacaatcattcacattgaagcttattttgaggtagtccggtgattgatgacgatggctaccgcccaaatgtcggcattgtaatctgtaaccgccagggccaggtgatgtgggcccggcgctatggtcagcactcgtggcagttcccgcaagggggcatataaacccaggcgagtccgccgagcaggcaatgtatcgggaattgttcgaagaggttgggttaagccgcaaagatgtgcggatcctggcctcaacccgtaactggctgcgttacaagctgcctaaacgtttggtgcgttgggacacaaagccggtttgtatcggtcagaagcagaagtggtttcttctacaactggtcggcagcgatacggctattaatatgcaaaccagcagtacacctgagtttgatggctggcgatgggtaagttactggtacccggttcgtcaggtggtgtcgtttaagcgcgacgtttaccgccgggtgatgaaagagttcgcgggtgtgacaatgtcgctcgctgaaaccacaccaaagccacaaagcgcgcctgcttatcgacgtaaaagaggttaagccacgcacattatgctcactcggttgcgagaaatagtcgagaaggtcgccagcgcgccgcgtttaaatgaggcgctggatatcctggtgacggatgtctgcaaagcgatggaaacggaagtttgttcggtttacctggctgacaacgatcggcgctgctattacctgatggccacgcgcgggctgaaaaaaccccgcgggcgcacagtcgcactcgcatttgatgaaggtcttgtcggcctggtggggcggctggccgaaccgatcaacctggccgatgcgcagaagcatcccagctttaaatacataccggctgttaaggaggagcgttttcgcgccttccttggtgtgccgatcatccagcggcgtcagctgctgggtgtgctggtagtccagcagcgtgagctgcgccagttcgatgaaagcgaagagtccttccttgtcaccctcgccacccagatggccgcgattctctcccaatcacagttaaatgcgctgtttgggcagtatcgtcagacccgcatccgcgcgctgccggcatcatccggggtggcgattgccgaaggctggatggatgccagcctgccgttgatggagcaggtctacgaggcctcgacgctggacaccgcttccgagcgcgaacgtctcaccggcgcgctggaagaggcggcgaatgagtttcgtcgctacagcaagcgctacgccgccggggcgcaaaaagagacggcggctatttttgacctctattcgcacctgctatccgatgcgcgcctgcgccgtgagctattcgacgaagtcgacaaaggctccgtcgccgaatgggcggtgaaaaaggtcattgaaaaatttgccgagcagtttgccgccctcagcgatggctatctgaaagagcgggcgggggatttacgtactctcgggcagcggctgttgttccatctcgacgacaccacccaggggccgaatacctggcctgagcgcattatcctggtggccgacgaactgtcggctaccacgcttgcggaagtgccgcaggaccgcttggtcggggtggtggtgcgcgacggcgcggccaactcccacgcggcgatcatggtgcgcgcgttgggtattccgacggtaatgggcgccgatattcagccgtcgctgctgcatggccatatgctgatcgttgatggttatcgcggcgatctattggtcgatcccgaaccggtgctgctgcaggaatatcagcggttaatcagcgaagagaacgaactgagccggctggcggaagacgatctcgaacgcgcttccgaactgaaaagcggcgagcgagtaaaagtgatgctcaacgccggtctgagcccggagcatgaagagaagctcggcagctttatcgatggtatcgggctttaccgcaccgaaattccgtttatgttacagagcggcttcccctccgaagaggagcaggtcgctcagtatcagggcatgctgcagatgtttaacagcaagcctgtaaccctgcgtacgctggatattggcgccgataagcaactgccgtatatgccgatcagcgaagagaacccgtgccttggctggcgcgggatccgtattacgctcgatcagccagagatcttcttgatccaggtgcgcgccatgctgcgcgccaatgccgccactggcaacctcagcatcctgctgccgatggtcaccagcctcgaagaagttgacgaagcccgccgcctgattgagcgcgccagccgtgaagtcgaagagatgattggttacgctattccgcgcccgcgcctcggggtgatgctggaagtgccgtctatggtctttatgctgccgcagttggcaaaccgcatcgactttatctcggtcggcaccaatgacctgacgcaatacatcctcgcggtcgaccgcaataatacccgcgtcgccaatatgtacgactgcctgcatcctgcggtattgcgggcgctggcaatgatagctcatgacgccgagcgttttggtatcgatctgcgcctgtgcggcgaaatggcgggcgacccgatgtgcgtcactatcctggtaggactcggctatcgccatttgtcgatgaacggccgttcggtcgcgcgcgtgaaatatctgctacgccgtatcgatatcgaagaagcgcaggagctgtcacggcgcagtctggaagcgcagatgaccaccgaagtgcgccaccaggtggcggcgtttatggagcgccgcggtctcggcggcctgatccgcggcggacggtaacgtagttaacataggtcgggtaaggcgttagccgccacccgacaaaaaacggcatcgcgagtagtgctgtagccccggtaagcggcagcgccaccgggggattttgagatcaccatcaccagtagtgtcagccatcatggtgaataaattaaaggcaggccgcacggaccgtaggtcgggtaaggcgttagccgccacccgaccaaaaaacggcaccgcgagtggcgagcccggggaaaaaaccgcacgctgttagcatccgtatacatatcttttacacgttcagcgcggatcgcactacacgcttatgctatcattcgcctccttcggagtgcccgttttaagcgggcacggatcatcaccgctgtccactttcggcggaataacaagtctttatggtgacagatgaatagtggctacctgcattttccggagttcgatccggtaatattttccattggaccggtctctctccactggtacggcttaatgtacctggttggtttcgtctttgcgatgtggctggccacccgtcgggccaatcgtccgggcagcggctggacgaaaaatgaagtggaaaacctgctctacgcgggcttcctcggcgtattcctcggcggtcgtatcggctatgtgatgttctacaacctgccggtcttccttagcgacccgctatatctgttccgcgtctgggatggcggcatgtcgttccacggcggcctgatcggcgtgattctggtgatgattatcttcgccaaacgcaccaaacgcaccttcttccaggtctctgatttcatcgcgccgctgatcccgtttggcctcggcgccgggcgtctgggcaactttatcaacggtgaactgtggggccgcgttgacccgaacttccattacgcgatgattttcccgggctcgcgcgctgaggatctggcgctgctgccgtcgcacccggagtggcaatcattattcgatacctacggcgcgctgccgcgtcacgcctcgcagctttatgagctggcgctggaaggcgtggtgctgttcctgatcctgaacctgtttatccgtaaaccgcgcccgaccggttccgtttccggcctgttcctgattggctacggcctgttccgcattatcgtggaattcttccgtcagccggacgcgcagtttaccggcggctgggtacagtacatcagtatggggcagattctttcgatcccgatggtgcttgcgggtatcattatgatggtttgggcttatcgtcaccgtccgcagcaacaaaactcttgaggaaccatgaaacagtatcttgatttgatgcagaaagtgctcgccgagggcacgccaaaaaatgaccgcaccggcactggcaccatctctatcttcggccaccagatgcgttttaacctgcaggaaggcttcccgctggtgaccaccaagcgctgtcatttacgctccatcatccatgaactgctgtggttcctgcagggcgacaccaacattgcctatctgcacgaaaataacgtcacaatctgggacgagtgggcggatgagaatggcgatctggggccggtctacggcaaacagtggcgctcctggcccgcgccggacggccgccatatcgaccagatcagcacggtcatggaacagctgaaaaacgaccccgactctcgccgtatcatcgtgtcggcatggaacgtcggtgagctggataaaatggcgctggcgccgtgccacgcgttcttccagttctacgtcgccgacggcaagctctcctgccagctgtatcagcgctcctgtgacgtgttcctcggcctgccgttcaacatcgccagctatgcgctgctggtgcatatggtggcgcagcagtgcgatctgcaagtgggcgattttgtctggaccggcggcgacactcacctgtacagcaatcacctggagcagaccaacctgcagctgagccgcgaaccgcgtccgctgccgaagctggtcattaagcgcaaaccggcgtcgattttcgactaccgttttgaagacttcgaaattgaaggttatgacccgcatccgggtattaaagcgcctgtggcgatttaacctctctgtagtgatgacaaaccggcgccagcagcgccggtttttttatgctcttcgtagaattttgcgagcctgattcctgacgccgctcaacatcctgcaactggcgaattttttcccgagccgcgacgcgaaccgtagatttaccattcgaatggatggtcagagcaacgcatactcgacgccatgaacagacagcatggctacaccctaattgaaatgctggtcaccatgatgctggtgatcatcctcagcgccagcggtatgtacggctggcagcgctggcaacagcaacagcgcctgtggcaggtcgcctgtcaggtgcgcgattatctcgtgctgctgcgcgatgacgccaactggcacaaccgcgagcgcgtcattcgcgtcggacaatcgcccgccggctggtgtctgagcgcaagcggcgtggaggctgactgtcacgcgaaaacaccttttaccctgcagccgctatggccggggattacgctgcaacatttgacggcgggcattggtttttacggcctgcgcaacagcgcctgggccggccatatcctgctgcaaagcgatggcggagcgtggcgaattgttgtctctaactgggggcgcatacgcctgtgtcgggaaggggaggaattatgccagtagcggcgcgtggtttttcgctcattgaaacgctgattgccatggcgattggcgcggtattactgctcggagccgctcgtttccttccggcgctacagcgccaggttcttcgccaaacgcagcagcaggcgctggaaaatgagctatggcagcgggtctatgcgttagccaaacatttgcagcgcgccggatattgcgcaggtcaatgtcatggtcaggcgctggtgattgccagcggcgggcagtgcgtcatcgttcgctgggatggcaacagcaacggcatttgggaactggcgccggaggccgatgccgattccaccggttttcgtctgcgcgacggagcgctggaaacgcggcgcggcgtcgctgactgcggcggtaaaaattgggagaaaatgaccaatcccgccgctatcacggtcacgcgctttcacgttgagcggcaggcgataagcgggttttctcctgaacttatcgttaccctgggggcgcaggcgcaatcggactcgcgtatttccgccgaggcgcaatatcgggtgacggggttcaacctgtgaaacgccagcgcggagtttcatcgctgctgatggtgctgctgttactggcgctgggcagcctgctgttgcaggggatgaatcagcagcagcgatctctgctggcgcaagtgagcgccgaaacccaggcgattcgcgatacggccgccgcgcagtcggcgctgcaatggggcaaaggggtgaactggccgctgcagagcgcagttgcgtgtcaacaggaaaacagccaacgctggcgcgcgtgcctgcggctttttaatgatggccgcgcgctgcttattgccggcagtggcacgatacagctatggcagtcagcgtcgattgaacagggcgtgctgcgctatttagcgcgtggctggagcgacttttgcccgttgaaggagagtgcgttatgcctgatgccgtagcgcgccagcgcggttttagcctggcggagacattattagcgatggcgctgttaatcatgaccatcgcggcgcttggcggttatcaccgcgggctggccagcggcgccgctcaattgaacgcctaccgccagcagtggcgggaggcgtggcgctttagccagctcattcccccggcacagcccgcgcaagggcaaataagccgcttgcagacatcgaggcaaagttgtgtcagcatcacggtaacgatcaccatgcccgccgctaagcgggtgcagatgaaccggctacattgtccggcaaatcagtagtcaggagcgaatatgttaagggtgtaccactcaaaccgtctggatgtgcttgaagcgttgatggagtttatcgtcgagcgccagcggctggatgaccctttcatgccggaaatggtgctggtgcaaagtaccggtatggcgcaatggttgcagatgacgctggcaaagcgcttcggtattgcggcgaatatcgagtttccgctgccggccagctttatctgggatatgttcgttcgcgtgctagacgatattcccggcgagagcgccttcagtaaacagagcatgagctggaagctgatgaccctgctgccgcagtatctcgacgatgacgccttcacattgctgcgccactatctgagcgatgacagcgacaagcgtaagctattccagctagccgcgcgggtagccgatctgtatgaccagtatctggtctatcgcccggagtggctgatgcgctgggaggctgatgaacgggttgacgggctgggcgacgctcagcagtggcaggctccgctgtggaaagcattagtcgaatacaccgcggagcttgggcaaccgctgtggcaccgcgctaatctgtaccagcgctttatcagcgcgctggaaaatgctgaccagccgccagccgggctgccgtcgcgggtctttatctgcggcatctccgcgctgccgccggtgtatttgcaggccctgcaggcgctgggcaagcacgttgatgtctatgtactcttcactaacccctgtcgctactactggggcgatattaaagatccggcgtttcttgccaaactgatgtcgcgccagcgccgccaccaccgcgaggcgcgcgagctgccgctgttccgcgacaccgaacaggtgccggggttgtttaatgatgatggcgagcaggatgttggcaacccgctgctggcctcgtggggcaagctcgggcgcgattatatctatctgttggccgggctggagcgctatgaagagctggacgcctttgtcgatatcgcccccgataacctgctgcataaccttcaggccgatattctggatctgcgcaacgccgcggtggcagggcgcaccgcgcaagagttcgccagcagtaagagcaagcgtccgctggcgactgacgaccgcagcctggctatccacgtctgccatagcccgcaacgcgaagtggaagtgctgcatgaccggctgctggcgatgctggaagaagacccggagctgacgccgcgcgatattatcgtcatggtcgccgatatcgacagctacagtccctatattcaggcggtattcggcgcagcgcgcggcgaacgctggctgccgtgggcgatttccgaccgtcgggcgcgggaatctcacccggcgctacaggcgtttatcacgttgctttctctgccggatagccgtttcgccagtgaagatgtgctggcgctgctggatgtgccagtgctggcggcgcgcttcaatatcaatgaagaggggctacgctatctgcgccagtgggtcaatgaatccggcgtacgatggggtatggatgacgacaacgtgcgcgaaatggatctcccggcgaccggtcagcacacctggcgtttcggtttaacacgtatgctgctgggatatgcgatggacagcagccagggcgagtggcagtcggtgctgccctatgatgaatccagcgggctgattgccgaactggtggggaatctcgcttcgctgctgatgcagctcaatctgtggcgccgcggtctggcacaggatcgcccgctgacagagtggctgccggtgtgccgcgatctgctcacggatttcttcctgccagacagtgaaaccgaagcggcgctggcgctgattgaacagcaatggcaagccatcatcgatggcgggttggatgcgcagtacggggctgccgtgccgctatcgctgctgcgcgatgagctggcgcagcgcctcgatcagcagcgcatcagccagcgtttcctggccgggccggtgaatatctgcaccctgatgccgatgcgttctattcccttcaaagttgtctgcctgctggggatgaacgacggcgtctacccacgcaccctcgcgccgctgggttttgatttaatgagccaaaaaccgcagcgcggcgaccgtagccgtcgcgacgacgaccgctatctgttcctggaagcgctgatgtcggccgaacagaagctatacatcagctatatcggccgctctattcaggataatagcgagcgctatccttcggtgctggtacaggaactggcggactatatcggtcagagccactgccttgaaggcgatgaagcgctggactgcgatgccagcgaacgccgcgttaaagagcacattacccatctgcatacgcggatgccttttgatgccgccaattacctgccggatgaagatcagagctatgcaagagagtggctggccgccgccagccagcagggagaggcgcatagtgaatttatccagccgcttgcgccgctcgatatcgacacgctgccgttcgaacagctgttacgcttttggcagcatccagtgcgcgctttcttccagcagcgtctgcgggtgaatttccgctctgaagagagcgagatccccgaagatgagccttttgtgcttgaagggctaagccgttaccagttgaaccaacagttgctgaatacgctgattgaacaacaggatgcgtcagcgatgtatcgtcgttttcgtgcggcgggtgagctaccttatggcgcgtttggcgaactggcgtgggaggcgcagcgtcaggaaatgcagaacctggctgagcgggttatcgccagtcgtcaacccgcgcaaagtatggagattgacctacagtgcaacggtatcaatctcaccggctggctacagcaggtacagccggatgggctattgcgctggcgtccgtcgctgctgagcgtctctcagggcgtgcaactttggctggaacatcttgtctattgtgctagcggcggtctcggcgaaagtcgcttgttcgtgcgcaaggaaggcgaatggcgtttcccgccgctggcggctgagcaggcgcagacgtatctaaatgagctggtagaaggctacctgcaggggatgtcaaaaccgctactgctgttgccggaaagcggcggcgcgtggctaaaagcctgttacgacgcggaaaaggatgtcatgttaatggatgacgaaacgcaacaaaaagcgcgtagcaagttccttcaggcctacgaaggtaatatggtggtgagcggcgaaggtgccgatatctggtaccagcgcctgtggcgcacccttgagcctgcgtactatgaagagattatcgcgcaggcgcagcgttatctgttgccgatatttcgtttccatcagtccgaataaaattgtaatagtataaaaattgcgcaaaagaaggttgttcatttattatgcgcagcgaatcacggactgatgttttaaatacccggaagatggcccgagcctgatgatgggtatccacgctgacgctatgcagcgcgaagtttgttaatgatgaggtccgtgaatgccccgcagtttatggttcaaagttcttgttgtagtggtcgccctttgggcgccgttaagtcaggcagacaccggatggcaaccgattcaggaaaccatccgtaaaagcgaaaaagatccccgtcactatcaggctattcgcctgcaaaacggcatggtcgtgctgctggtatccgatccgcaggcggtaaaatcgttgtcggcgctggtggtgccggtgggttcattacaggatccggccgaccatcaagggctggcgcactatctcgagcatatgaccttaatgggctcgcagaagtacccgcagcctgacagccttgctgaattcctcaaaatgcacggcggcagtcataatgccagcacggcgccgtatcgcaccgcgttctaccttgaagtggaaaatgacgcgctcaacggtgccgtcgatcggctggccgatgccattgccgcgccgctgctggataaaaaatatgccgaacgcgaacgtaacgcggtcaacgccgaattgactatggcgcgtacccgggacgggatgcgcatggcgcaggtgagcgccgaaaccatcaaccctgcgcatccggcttcacaattctccggcggtaacctcgatacgctgagcgataagcctggcagcccggtgcttgatgctctgcacgctttccgcgaccgctggtactcggcaaacctgatgaaggcggttatctacagtaataagccgctgcctgaattggcaagcattgccgccgcgacctacgggcgggtgcctaatcatgacatcagcaagccggagattaccgtaccggtcgtgaccgatgcgcagaagggcattgtgattcactacgtgccggcgatgccgcgcaaggtgctgcgcgttgaattccgcatcgataacaacagcgctcagttccgcagcaagaccgatgagctggtgacctatatgatcggcaaccgcagtcctggtaccttatcggactggctgcagaagcaggggctggcggaagggattcgcgcggattccgatccggcggtcaacggtaatagcggcgtgctggcgatctccgctaccctcaccgataaaggcctggcgcaccgcgatgaagttaccgccgctattttcagctacctgaatttgctgcgtactcaggggattgataagcgctactttgatgaattagcccacgtgctggagctcgatttccgttatccgtcgattaaccgcgatatggattatgtggagtggttggccgataccatgattcgcgtgccggtagagcacgtactggacgtggttaatatcgccgaccgctatgatgcccaggcgatcaaagaccgtctggcgatgatgaccccgcaaaatgcgcgtatctggtacatcagcccgaatgagccgcacaacaaaaccgcttatttcgtcaacgcgccgtaccaggttgataaaattagcgcccggaccttcaccgactggcagcaaaaatctgcggccatcaagctgcagctgccgacgctgaacccctatattccggatgatttcacgctgattaagagcgataaggcctacccgcatccggagcttatcgtcgatgagccgacgctgcgcgtggtgtacgcgccaagccagtactttgccagtgaaccgaaggccgacgtctcgctggtgctacgtaacccgcaggcgatggacagcgcgcgccgtcaggtgatgttcgcgttgaatgattacctggccggtatcgccctcgatcagcttagcaatcaggccgcggtaggcgggataagcttctcgaccggcgccaacaacggtctgatggttaatgccaacggctatacccagcgtctgccgcagctctttaccgcgctgctggacggctactttagctatacgccgaccgaagagcagcttgagcaagcgaagtcctggtatgcccagatgatggattcggcggacaaaggcaaagcctatgaccaggcgattatgccgattcagatgctgtcgcaggtaccctattttgagcgtaaaacacgtcgcgatttactaccgtcaatcaccctgaaagaggtgatcaactaccgcgataacctgaaagcaagagggcggcctgagctgctggtcatcggtaacatgagcgcccgagagtccaccgatctggcccgccagatccaaaaacagcttggcgccgatggtaacgaatggtgtcgcaataaagacgtgctgatcgacagcaaacagctggcgatgtttgagaaagcaggcagcagcaccgactccgcgctggcggcggttttcgcgccgccaaatgtcgatgaatacagcagcatggccgccagttcgctgttagggcagattattcagccctggttctacaaccagttacgtactgaagaacaactcggctatgcggtattcgccttctcaatgaatgtgggccgccagtgggggatgggcttcctgctacagagcagcgataaacagccggccttcctctggcagcgcttccaggccttcttcccgacggcggaagccaaactgcgggcgatgaaaccggaagagtttgcccagatccagcaggcggcgattagccagatgctgcaggcgccgcaaacgttgagcgaagaagcatcaaagctgagcaaagatttcgatcgcggtaatatgcgcttcgattcacgtgataaagtagtggctcagatgaaactgctgacgccgcaaaaacttgccgacttcttccatcagacggtggtggatccgcaaggcatggcactgttatcccaggtttccggcagccagaacggcaagacggaatacgccgcccctgaaggcggtaaggtatgggaaagcgtcagcgcattgcaaaaatccttacccctgatgcgagagaatgaatgaccgaaaccgctgagtctcttgacccactccgcttgcccctgacgggcgagcggctgatagaagcctccgcgggcaccggaaaaacctttaccatcgccgcgctatatctacggctgctgctggggctggggggggaatctgctttcccccggccggtcagcgtggaagagctgctggtggttacctttaccgaagcggcgacggaagagctgcgtgggcgcatccgcagcaatattcatgaactgcggatcgcctgtttgcgtgagagttccagtaatcctctgtatgcctctctgctcgcggaaatcgccgataaaaaccaggcggcgcaaacgttgatgctggcggagcggcagatggacgaggcggcagtctttaccatccacggcttctgtcagcggatgctaagcctcaacgccttcgaatccggcatgctgtttgaacagcaattgatcgaagacgaatcccgcctgcgttatcaggcctgcgccgacttctggcgtcgccactgttatccgctgccgcgcgatatcgccgcggtgatccatgaacagtggaaaggaccacgcgatctgctcaaggcgatcgaccgctggctgcagggcgaagcgccgcagctaaaatcgccgccgcccgcggaagagacgctggcaagccgccatcagcaaatcctggaacgtatcaatgcgctgaagcagcagtggcgggagcaggttagcgaaattgaaaacgtgctggaaaactcagggctcgatcgccgcaagttcaaccgcggcaaccagggcaagtggatcgaaaaggtcagcgcctgggcgcaggaagaaacgctgagttatcagttgcctgatgcgctggaaaaattctcgcaaccgttcctcattgagcgcaccaaagacggcggcgaaccaccgttgcatccgttattcagcgcggtagaggcgctgctcgcctcaccgcttaccttaaacgatctggttatcgccagggcgatggtggagatccgtgaagcggtcgcccgcgaaaagcggcgtcgaggcgaactgggctttgacgacatgctcagccgccttgacgacgcgctgcgcggcgacagcggcgaagcgttggccagcgctattcgtcagcgtttcccggtggcgatgatcgatgagttccaggataccgatccgcaacagtatcgtatcttccgccgcatttggcgtcgccagccggatacggccctgctgctgattggcgacccgaaacaggcgatttacgcctttcgcggcgccgatattttcacctatatgaaagcgcgtggcgatgtcgctgcccactatacgctggataccaactggcgttcggcgccaggcatggtacagagcgtaaatcgtctgttcggcctgagtgataatccattcatgttccgcgagatcccattcttgccggtgaagccagccgctaaaaatcagacgttgcgctttaccattgatgagaagccgatcccggcgatgaacatgtggttaatgcctggcgaagccgtcggttctggcgattatcagtcttttatggcgcaattgtgtgcgacgcagatccgcgactggctcagcgccggcctgcaggggcgcgcgctgctgtggcgcgacgaaaaagccgagccggtgcgcgcctccgatatcaccgtgctggtgcgtaaccgtctcgaagcggcgctcattcgcgatgcgctgcagcttttgtcgatcccgtcggtctatctctcaaaccgcgacagcgtttttgaaaccccggaagcgcaggaattactgtgggttctacaggcggtactggcgccagagcgtgaaaacacgctacgcagcgcgctggcgacgtcgatgtttggccttaatgcgcaggatatcgaaaacctcaatcaggatgaacgtgcctgggatgcgctggtagaggagttcagtgaataccggcacatctggcgccagcgcggcgtgatgccaatgctgcgcgcgctgatgggcgcgcgtcatattgccgaaaacctgctggcgacccacggcggcgaacgccgtttgaccgatattttgcatatcagcgaattgttacaagaggcggctaatcagttggagagcgagcacgcgctggtgcgctggctgacgcaacatatcgccgaaccggacagcaatgcttccagccagcagatgcgtctggagagcgataagcatctggtgcaaatcgtcactatccacaaatcaaaaggactggaatattcgctggtctggctgccctttatcgcgcgctttcgcaaacaggatcaggcgttctatcacgaccgcgattcctttgctgcggtactcgacctcggagagggggagaatagccttgagctggcggaagccgagcgtctggcggaggatttacgcctgttgtatgtggccctgacccgcgcggtgtggcactgcagtctcggggttgcgccgttaagtacccgccgaagcgataaacctggcaacagcgattttcatcacagcgccctcggccgtctgctgcaggacggcgagccgatggacgcggcgggattgaccgcgcggctacaggcattatgccacgatgatattgcgctatgtattcccgataccatggaccagacaccgtggcaggcgccggaaaacgcgctaccgtcgctttcggcgcggacggttgaacgccaggtgagtgacgactggcgggtgaccagttattccggcctgcagcaacatggttccagcgccggtcaggagctgctaccgcgtctcgatatcgacgccgcgggcgttggcgaggtggcggaagagccgcagctcacgcctcatcagttcccacgcggcgcgtcgccggggactttcctgcatagcctgtttgaggatctcgatttcagtcagccggtaccggttgactggatggcgcaaaaactacagttgcacggttttggcgaagagtgggcgccggtgttgagcgaatggctggacggcgtgctgcgaacacgcctgccgggggctgaaatcgccctgaatcagctgggcgtgcgggataaacaggtggaaatggccttctatctaccgattgaacaaccgctggatccgctgcagctggacgcgctgatccgccgctatgatccgctgtcggctgataccccggcgctcgatttccgccaggtccgcggcatgctgaaagggtttatcgatctggtatttcgtcatgatggtcgttattacctgctggactacaaatctaactggctgggcgaagatcgcgaagcctatacccagcaggcgatgatccaggcgatgcgcctgcatcgttatgatctgcagtaccagctgtatagcctggcgctgcaccgttatctgcgtcaccgtattgccgattatcactacgagcggcactttggcggcgtcatttatctctttttacgcggcatggacgggcaggaaggcgggcaggggatcttcaccacccgcccggcgcagccgctgattgacggcctcgacgcgctatttgccggtgttgcccaggaggtggactcatgaccatggatgaactgctgctggccgccgccgagcagcgtttgctgcgaccgctggacgtacagtttgcgctgatggtggcgcaggatgcccctccggcagtgaagctggccgccgcgctgttgagccgggatgccggagaaggtcatgtctgcctgccgctgtcgcgcctcaacgctgaagaagcgctaagcggcaaggccggcgagatccgcgaccagttgctggcgatggccggagagccgcaggactggcctcaattgttgctttcttcgtcagcggtgagccgcggtgacgaaccgacgccgatgattttatgtggcgacaggctgtacctgaaccgcatgtggcgtaatgaactcaccgtcgcccgcttttttaatgagacgaaccgggtactggaggttgatgaagggcggttaacggcaaccctgaatgaactctttcctgcgaccgacgatatcgactggcaaaaagtcgctgcggcggtggcgctgacccggcgcatttcggtgatctccggcggtcccggcaccggcaagaccactaccgtcgcgaagctgctggcggcgctgattcagatcaacgacacgtcgcgctgtcgaattcggctggcggcgccgaccggcaaagccgcagcgcgcctgacggaatcccttggggcggcgttaagaaaacttccgcttagcgatgagcaaaaagcgctggttcccgccgatgccagtaccttgcatcgcctgctgggggcgcagcccggcagccaacgcatgcgctaccacgccgggaacccgctgcatctggatgtgctggtggtcgatgaagcctcaatgatcgacttaccgatgatgtcgcgtctgattgatgctttgccggaacatgggcgggtgatttttctcggtgaccgtgaccagcttgcctccgtggaagccggggcggtgcttggcgacatctgcgcctgggcgacatccggttataccgcggcgcgagcgcaagaactgtcgcgtttgaccggcgcaacggtgccggcgggggaggggcagatcgccggggcgttgcgcgatagcctgtgcctgttgcaaaaaagctaccgctttggcagccattccggtattggcagcctggcgcgggcggtcaatgccggtgcgcgcgcagaagtgaaagcaacattacgccagccgtttgaggatatcgttctgcagccgctcagcaccaccgaggagtatgaagcgatgctgatggcggcgcaggagggctacggccgttatctgcaactgcgccgcgagcaggccgcgccggaacagatgattgccgccttcggcgaatttcagctgctgtgcgcgctgcgtgaagggccttatggagtaagcggcgtgaatgaacagctggagcagatgcttcatcgtaagcgggcgattacgctaccgcgccattcacgctggtacgatggtcgtccggtgatgatttcccgtaacgatagcgcgctggggctgtttaacggtgatatcggtattgcgctggaaagggacggcgaacttcgcgtgtggttcccgatgccggatggcagcattaaatcggtgcagccaagccgcctgccggaacatgataccgcctgggcaatgacggtgcataagtcgcaagggtcggagttcgatcatgcggcgctgatcttgccttctcgtagcgtaccgctggtgacccgcgagctggtttataccgcgattacccgcgccaaacggcgcctgtcgctttacgccgacgagcaggtactggcgcaagccatcgtgacgcgcaccgaacggcgcagcggcctggcggagattttcgcgcagggcggaaagcccggataaggcgcagtcgccatccgggggagccctgctggcgctacgtttcgatgtcgtcgggtagcccggataaggtgcaagccgctatccgggaatcctcccccggtggcgcttacgcttaccggggctaccaaccgactaccgaaccgtagcccggagaaggcgtaagccgctatccggggagttatccgtcagcccaggtctgccatcaataccttcgaacgacgctgatagttgtacatctgttttttactctccggcagcaaatcaatatccaccggggtgaagccgcgttcctggaaccagtggatactgcgggtggtcaacacgaatagcttgctgagccccatctgcttcgcctgggcggcgatacggctcagcagtacctcgccgcgtgacgaactacggtaatccgggtgcaccgctacgcaggccatttcgccgattttctcttccgggaacggatagagcgcggcgcaggcgatggtggtgttatcgcgctggatgatggtgaatttatcaatctccatttccagctgttcgcgcgagcggcgcaccagaatgccttgctgctccagcgggctgataagatcgaggatgccgccgatatcgttaatggttgcccggcggatctgctcggcgctttccatgacgatctgcgtaccgataccgtcacgtgagaatagctcctgcagcagcgcgccatcttcctgatagctaattaaatggcagcgacgcacgccgctgcggcaggctttcaccgccccgcgcaggaagcgtacggtaccggaattataatcttcttccgcttccagctcctctacccgcgcctgcgcctcgttagggaacagctcggaaacgatctcgccatgctggtcgtagaccccctgcgacgagcagaagccgatcatcttttcagctttcagctttaccgccagttgggtggctatctcttcagaagtgaggttgaagctctcgccggtgacggataccgcgaccgggcccatgagcacgattgcgccgctgtccagttggcgatgaatggcttcttcatcgatgcggcgaatacggccgctgtggcagtaatcgacgccatcatcgacgccaagaggttgagcaataataaaattgccgctcaccacgttgatatgcgccccctgcaggggcgtattgccgaggctcatcgacaggcgggcggtaatttctaactgcagcataccggcggcctgcttaaccagctcaagggttttggcgtcggtgacgcgggtctgcttgtggtaaaccggctcgtggtggtgttccgcgagattagcgtcaatttgcggacgcgcgccatagaccaccaccaggcgaataccgaggctgtgcaataagccaatgtcattgactatgctggaaaagttatcgtgctcgatggcttctccgcccagcatgatgacaaacgtttttccccggtgcgcgtttatatagggaacagaatggcggaatccctcgaccagttcagtgcgacgctccttcaccatgacaaaccctcaatgcatgattattcgtaataagtgtatttttattctgttttgcttcgtggcgcaacccctaatttgtcactaatttgcgaaaacattgtgacaaaaccttgggtgtcaaagtttgtttacccttttatagatgacaggttatgcggctttggttaaagtttctggtcaatctgttcattttggcttcaaacacgttttttttgcttgggagtggcatgtcgggatacaagtcgggattaagccgccgtcgttttttacaaggggcgggcgccatgtggttaatgagtgtgagtccggtcggtttggccgccgccgcgcaggtagtcgcggtgcgtatctggccgtcgtcgacttacacccgcgtcacggtggaatccaatcatgtactgaaatatcggcagtttgcgttaagcaatcctgagcgagtggtggttgatattgaaggcgttaacctgaattcggttctgaaagggatgggcgggcaaatccgcgacgacgacccgtatatcaaatccgcgcgcgtgggccagttcgacccacagaccgtgcgaatggtgtttgaactgaaacaaaacgtcaaaccgcagctgtttgcgctggcgccggtcgccggttttaaagagcgtctggtgatggatctttatccctctacggccaccgatgtgcaggatccgctactggcgctgctggaagattacaacaaaggcgatctggaacgtcaggtaccgccggcagaaagcgggccgcagccggggaaagccgggcgcgatcgtcctatcgttatcatgctcgatcccggccacggtggtgaagactccggcgcgattggtaaataccgaactcgtgagaaagacgtggtgctgcagattgcccgtcgattgcgcgcgctcattgagcgtgaaggtaatatgaaggtctatatgacccgtaacgaagacgtgtttattccgttgaaggtgcgtgtcgccaaggcgcagaagcagcgtgccgacctgttcgtttcgattcacgccgacgcctttaccagccgtcagccgagcggctcttcggtgtttgcgctctcgaccaagggcgctaccagtaccgccgcaaaatacctcgcgcaaacgcagaatgcctcggacttaatcggcggcgtcagcaagagcggcgatcgttacgtcgaccacaccatgttcgatatggtgcagtcattgaccatcgccgacagcctgaaatttggtaaagcggtgttgcaaaaaatgggcaatatcaacaagctgcataaaaatcaggtggagcaggcgggctttgcggtactgaaggcgccggatattccttcgattctggtcgaaacggcctttatcagtaacgtcgaagaagagcgtaaactcaagaccgcgaaattccagcaggaagtggcggagtcgattctggcggggatcaaagcctactttgccgatggggcgacgttggccagacgtggataaaaaaatagcgccttcgggcgcttttttttatagcggtatttacggacggcagaaacaaaaaaacacccttaagggtgttcattgtgttggttgcgggggccggatttgaaccgacgaccttcgggttatgagcccgacgagctaccaggctgctccaccccgcgtccgtctttactcttccatcgagtaaatttgcttctgattgtaattggttgcgggggccggatttgaaccgacgaccttcgggttatgagcccgacgagctaccaggctgctccaccccgcgtccgcgtctactcttccatcgagtagatttacttcagattttaattggttgcgggggccggatttgaaccgacgaccttcgggttatgagcccgacgagctaccaggctgctccaccccgcgtccgtggaagcgcactatactccgctagcgttctgatgcaaccttttttcgtagaaatcgtcaattttgtaaaaaacggcggctaaaaatacagtaatgggcgaatttttacacaatttgggctgcggggcgctttcgtgcatttcattagccgcatgggtttgttatcttcatcacgcactaaggcttagcagcaataaagaagagataccatgaaaggacgttgggcaaaatatgtagcgacgggggcaatgctggcgatgctcgccgcctgtacctcgaaaccgaccgatcgcggtcagcaatatagtgatggcaagtttacccagccgttttcattggtaaaccaacctgatgcggtaggcgcgccgattaacgccggcgacttctcccagcaggttggtcagattcgtagcgcctctccgcgtctctataatagccagagcagcgtctataacgcgattcaggagtggctgcgttccggcggcgatacccgcacgttacgccagtttggtattgatgcctggcagatgcagggggctgataactacggcaacgtgcagtttaccggctactacaccccggtcgtacaggcccgccacactcgccagggcgagttccagtatcctatttaccgtatgccgccgaaaaacggcaagctcccttcccgcgccagcatctatgccggagcgctcagcgataactacgtgctggcctacagcaactcgctgatggataacttcatcatggacgtgcagggcagcggctatatcgactttggcgacggttcgccgcttaacttcttcagctacgccgggaaaaacggctggccttaccgtagtatcggtaaagtgcttatcgaccgcggcgaagtgaagcgggaagatatgtcgatgcaggcgatccgtgaatggggcgaaaagcatagcgaagcggaagtccgcgagctgctggagcagaacccatctttcgtcttctttaaaccgcagtcctacgcgccggtgaaaggggcgagcgcggtaccgttgattggccgcgcgtcggtcgcctctgaccgttcgattattccgccgggaaccaccttgctggccgaggtgcctctgctggataataacggtaagtttaacggtcagtacgagctacgcctgatggtggcgctggatgtcggcggggcgattaaaggccagcacttcgatatctaccagggcatcggcccggatgcgggtcatcgcgccggttggtataaccactatggccgcgtgtgggtactgaaaaacgcgccaggcgccggtagcgtctttagcggttaacgtttaaacgtccgaacgtgtctaacccggatccgcgcaacgcgccggatccggggtctctactttattctgaggttttatgtctgtagtaatcagcgatgcctggcgccagcggtttggcggcacggcgcgtttatatggcgaaaaggcgctgcagtgttttgccgaggcgcatgtttgcgtagtcgggatcggcggcgtcggctcatgggcggcggaagcgctggcgcgtaccgggattggcgcgattacgctgattgatatggatgatgtttgcgtcaccaataccaatcgccaaatccacgcccttggcggcaacgttgggctggcgaaagcggaagtgatggccgagcgtatacgtctgattaacccggagtgtcgggtcacggttatcgatgatttcatcacgcccgagaacgtagtggaatacctgggagcgggctttagctatgtcatcgacgcgatcgatagcgtcaggccaaaagcggcgctgatcgcctggtgccgccgttataaagtaccgttggtgacgaccggcggagccggcgggcaaatcgatccgacgcagatccaggtggccgatttggcgaaaactattcaggatccgctggcggcgaaactgcgcgaacggctgaaaagccagtttggcgtagtgaagaatagtaaaggaaagctgggcattgattgcgtcttctcgaccgaagcattggtctacccgcaggcggatggcagcgtatgtgcaatgaaaagcacggcggaagggccgaagcggatggattgcgcctccggttttggcgcggcgaccatggtgacggcgacctttggttttgtcgccgtatcccatgcgttgaagaagatgttggcaaaagcgcagcgtcagggggaatagcccgggggacgttttccggacggcgcagaaccgtagcccggctcagcgtagcgcaagccggggagagggcgtttgaattagttctcgcgcgcggcggcgagcaccgcgtcgcttagcgcctgcagcccctgactgcgtgaagcgctaagctgcccgcgcaaacccagctcatcgaataacgccaacggattattcgctaaaatctcagcggcgctttttccttcgcaggcggctaacagcaccgccagcaggccgcgcacgatacgcccttcgctatcgccaaagaagtgcatcttgccctcagcatcaacctgataccccagccagacacggttttcgcagccggcgatctctttcgcctgcgcccgctggtcatccgttaatggcggcagtttcttacctactaaaatcaactggcggtacttatcttcccactgagttagcggggcgaagatctggcgcagcgtcgcttcgctgagcgcggcgcttaaaggttgggaggtcatcattaatccaccagtatttccagcgcgcggtcgatagcgtgcaccagcgcataaacatcatcttgcgtattgtacggcgcgaatgaggcgcgcagcgtaccgctgacgcctaataccgccagcagcggttgcgcgcaatgctgcccggcgcgtagcgcaatgccggactccgccagcaacgtaaccatatcgctatggtgtacgccctcgaaatcaaaggccagcaggctcgaatcctgacagcggaacgaacgaaaaccgggccgctttgccagctcatcttccgcaagcgtcgccaggctacggctccagctttccgcctgtgtaagatcgatttcctgcagccattccagcgcggcgctgaggccgataacgccggcgacgttgggcgtcccggcttcaagccgccagggggcgggctgggttttaaagccatcgaatgagacttcagtaatcattttgccgccgccgagccatggcgacatctccgccagcaactcgcttttgccatacagcgcgccaatacccgttgggccatacagcttgtgggcggagaaggcataaaaatcgatatccagcgcctgcacgtcggccggaaagtgcaccgcgccctgcgcgccatcaactatcactatcattcccgcctgatgggcgaaatcaatagcaagtcgcagatcggggcagccgccggtgacgttagacatctggccaatcgccagcacccggctgcgcggagagataagcgaaggcagttgcgcgacatccggcagacgatcggcgcccagcggaagcttgaccacccgcgcgccggtttgttcggcaaccatcagccacggcaccaggttggcgtggtgttcggcttcgctgacgattatttcatcgccaggatgcaggcgcgggcgcacgtaactctgcgcgaccatattgatggcttcggtggtgccgcgggtccagacgatatctttgccggaagaggcgttaagccaactggcgacgcgttcgcgcgccgcctcgtagcgctcggtaagacgctgggcggcggcaaactggctgcggtggacgttgccggcgctcagacgataaaactggtcgctggcatcgatcacggccagcggttttagcgccgtcgccgcgctatccaggtagacgccggcatccgccagggctggaaactgggcgcggaagtgggcgggattgaatgcgttcatggaattcctcatatcgatatcacgatcgtcgcgcaaattccccattagggcaaggctggtgatagcgaggaggcggggagaacggtgatttttcggcaaaaaaaagcaccgcgcattgcggtgctacattaaatcactatggacagacagggtaaatgtacaggaagtgaaaaggtagccttgctaccatggtctgcaaacccagaccaattgcaaacacaacaacacaacatcacaaccgtaagccaaaagcttgttggaacacgcattccaaaaaaagcttttcgttccggctcaggaagtgccgccactataggtatttgctggtagaacctcaacggacaatttataatggctcagataaaaaaaactaataggttaactgttgtttcctatttgttaaaactcgttaacatctcagtcagaataaccatgtcgaagcgattaccacctctgaatgcattacgtgtttttgatgcagccgcacgtcatctgagcttcactcgcgcagccgatgagctttttgtgacgcaggccgcagtaagtcaccaaatcaagtcactagaggactttctgggcctgaagctgtttcgtcgacgcaatcgctcgctgctgttaacggaagaggggcaaagctattttcaggatattaaagagattttttcgcagctcaccgaagcgacgcgtaaactgcaggcgcgcagcgcgaaaggggcgctaactgttagtttattgcccagtttcgccattcagtggctggtgccgcgactctcaagctttaactcagcttatccggggatcgacgtgcggatccaggcggtggaccgtcaggaagacaaactggccgacgacgtcgacgtagcgattttctatggccgcggcaactggccggggctgcgtgttgaaaaactgtacgccgaatatttactaccggtttgttcgccgttgttgttaaccggtgacaaagcgttgaaaacgcctgccgatctggcgcaacatacgctgttacatgatgcctctcgccgcgactggcaaacttatacccggcaactgggtctaaatcatatcaatgtgcaacagggaccgatattcagccacagcgcgatggtgctgcaggcggcaatccatggacaaggcgtcgcactggccaataacgttatggcccagtccgaaattgaagcaggccgtttggtctgcccgtttaatgatgttctggtcagtaagaacgcgttttaccttgtttgtcatgacagtcaggctgaactgggtaaaatagccgctttccgccagtggattttagcgaaggcggcgagcgaacaagaaaaattccgctttcgttacgaacaataacggcctgatgaccaggcgttaactgactttgtagggtatcaacatgaccagccgttttatgctgatttttgccgccatcagcggctttatttttgtggctctgggcgcctttggcgcacacgtattaagtaaatcgctgggtgcggccgaaatggcctggatccacactggccttgagtatcaggcgtttcatacgctggcgattttaggcctgtctgtcgccatgcagcggcggataagtatctggttttactggagcagcgtgtttttggcgctgggaaccgtgttgttcagcggcagcttatattgcctggcgctgtcgcatttacgcctgtgggcgttcgttaccccggtaggcggcgtctgcttccttgccggttgggtattaatgttaattggtgcaattcgtctgaaacgtaagggcgttgttcatgaataaggttgtcctctattgtcgccccgggtttgagaaagagtgcgcagcagaaattaccgataaggcagcccgccttgaggtatttggttttgcccgggtcaaagacgactccggatatgtgatttttgagtgctatcagcagggcgatggcgagaagctggtgcgcgatctaccgtttagctcgctgattttcgcgcgtcagatgttcgttgttggcgaactgctgcgcgacctgccgccggaagaccgcatcacgccgatcgtcggtatgctgcagggcgtggtggaaaagggcggcgatctgcgcgttgaggtcgcggataccaacgaaagcaaagagctgatgaagttctgccgcaagttcacggtgccgctgcgcgcggcgctgcgtgaagccggcgtgctgaccaactatgaaacgccgaagcgtccggtggtgcacgtgttctttatcgcacccggctgttgctataccggctattcctttagcaataacaactcgccgttttatatggggatcccgcgcctgaagttcccttccgatgcgccgagccgttcgacgctgaagctggaagaggcatttcacgtcttcattccggcggatgagtgggacgagcgtctggcgaatggcatgtacgcggtggatctcggcgcctgcccgggcggctggacctatcaactggtgaagcgcaacatgtgggtctcttcggtcgataacggcccgatggcgcagagcctgatggataccggacaggtgacctggctgcgtgaagatggcttccgctatcgtccgaaccgcaataacatctcgtggatggtgtgcgacatggttgagaaaccggcgaaagtggcggcgttaatggcccagtggctggtgaatggctggtgccgcgagaccatttttaacctcaagctgccgatgaaaaagcgctatgaagaggtgtcgcaaaacctggcctatatccaggcgcagcttgatgagcacggaattaacgcgcagattcaggcccgtcagctgtatcacgaccgtgaagaagtgaccgtacacgtgcgtcgcctgtgggcggcggtcggcggccgccgcgacgagcgctaatcagcgctcagcagccccggccacgcattagcgcggccggggatcacgcggatggcaaacgcagctgctgtaggttgccatcgagctgtaaatccgtttgcaggcgggcgatttcccggcaggtaaacgccatctctttatgctcttcaagcttcttacgccacttctccggcacttcggcaagccgcgcgtagatgccttctaaatcctgataatccgttaacagctgcgccgcgcttttcggcccaatcccggcaacgcccgggactttcgagctgctaattcccgccaggccccagtagtccgggagctgttccggcgtcacgccgaattcattggcgataaacggcgcatccagccagcgtttctggaaatagtcgcggatgcgaatggtcggcgacagcagctgacagtagcctttatcggtcgaaacaatagtcgcctgatgtccggcctgggcaactttaacggcgagcgtggccgccaggtcgtccgcttcgctgccgggcagcgcccagcagcggataccgcgctgttcgaaagccgcccgcagcgccggcatttccgcttccagcgtttccggcatcggcgcgcgcccggctttatagtccggcagccgctggtggcgccagccgtgggtgcggtcttcatcgtcgaacaccgccacggcgtgcgtcggctggctgtggacgataagctgttcgagggcgtgcaggcaggtatccgcgcagggggaaccctgcaccgcatgaatacggcggatcagattgagcgcgtcgacaattaacagatgaacagccacaagatatctccctttgttctcaggctataagggtaacatcggtggcaatacgaggctattggtagcgcgaagttcgggaagcaggctcgcagaatgagccagggctggaggagagttggcccgacatgccgaagcgtgccgggccagaggcgttaatcgcaggcgacgattttcatcgccaggccgccgcgagaggtttcgcggtacttggcgttcatatctttgcccgtttcatacatggtctcgataaccttatcgaggcacacgcgcggttcgctggtacggcgcagggccatgcgcgcggcgttaaccgctttgaccgccgcgatggcgttacgctcgatgcacggtacctgcacctggccggcaaccgggtcgcaggtcaggccgaggttatgttccataccgatttccgcggcgatgcacacctgggccgggctagcgcccagcagctccgccagaccggccgcggccatcgagcaggccacgccgacttcgccctggcaaccgacttcggcgccggagatagaggcgttcatcttatacagcgaaccaatggcgctggcgaccagcatatagcgggccagagagttagcgttcaccttgcggataaacttgtcgtagtaggccagtaccgcaggaacgataccgcacgcgccgttagttggcgcggtcaccacgcggccaccggcggcgttctcttcgttcaccgccagcgcgaacatgttgatccagtccactaccgccatcgggtcgctgttggtattgtcctggcttaccagcatgcggcgcagcgcggcggcgcggcgcggaacgcggagtttgcccggcagcacgccttcagtggtaataccgcgctcgataccggcgctcatcacttcccacaccgcggcgaagtgctgttccagctcttctttgctgtgcagcgccagctcgttctgcatcatcagcccggagagcgacaggccggtttcattgcagtgtttctgcaggtcggcggcgtttttgtacggataaggcacggcaaccggcgcctcggtggtcaggccgaagtgctcttcatcgacgataaagccgccgccgatggagtagtaggtctggctgtagagcaccttgtcgccgcccagcgcggtaatgcgcatgccgttctcatgcagagaaaggttgtcggcatggaaattcatgcactggtcgacagggaactcgacttcgtgctgaccgttcgccagcagcaggcggccgtgggtgttaacgtcctgaataaagcccgggatcgcgtcgatgtcgacggtatccggcagattgccggccagtcccatgataatggcgatatcggtatggtggcctttaccggtcagagacagggagccgtaaacgtcgacgacgactttgctgacgtcggccagcaggccgcgcgcaatcaggtcgtcagtaaattgtttgcccgctttcatcggtccaacggtatgggagctggatgggccaatgccgattttgaaaatatcgaatacgctgatcatgatgtattccagtactgtcggaaagcgcgccgccgttaagcggcgcgaggggaggtcttaagagaattagctgaacagagagtagaaaatcgcggagatggcaatcaggcccataatcacaacgaagacgttgctgatgtggccgctgtatttgcgcatggccggaactttctggatagcgtacatcggcatcaggaacagaatcatcgcgataatcggaccgcccagggtctcaatcatgccgaggatgctcgggttcagtgtggccacaatccaggtggtgaccagcataaacagcgcggtcagcttgttcagtttgttgatttcgatggtcttgcctttgccgcgcagagacttaatcaccatgccgttgaaaccttcacgagcgcccagatagtggccgaggaaggatttggtgatagcgatcatcgcgatgatcggcgccatccaggcgataaccggtgcgttaaagtggttcgccaggtaagacagaatcgagatgttctgctctttcgccgccgccaggtccgccggagacaggctcagtacgcagctgaagacgaagaacataacggtcagcaccatcatgatgtgagcgcgcgccaggatgctggagcatttcttctctgcgccttcgccgtactcttcacgcttcgctaccgcgaaggaggagatgatcggcgagtggttaaaggagaagaccattaccgggatcgccagccacagggtcatcagcagaccgttaccggttgttgacgcgctgctcagcgacagggtttccagcgccgcgccgttccattgcgggatcaggtacagcgccagaaccatcagcgcgataacgaacgggaataccaggacactcattgccttaacgatcatctgctcgccgaaacgcacgatggtcatcatgccgacaatcagaatcagggacagaatggcgcgcggcggcggcgtcatgtgcagctggtgcgccatgaagctttcgacggtgttggtgatcgccacgctataaaccagcaggatcgggtagattgcgaagaagtagagcagcgtaatcagtttacctgcgcctacgccaaagtgttcttcaacgacttcggtaatgtcttcgcccggatttttaccggacagcacgaagcgggtcataccgcggtgtgcgaagaaggtcatcgggaaggccagaatcgccatgataattagtgggatcataccgccgacgccggcgttgattggcaggaacaaaacgcccgcgccgatcgccgtgccgtacaggcccagcatccacatggtatccgttttgcgccatccgctgcgggattcacccgaaacgatagtgctggtttgtgtggtttccatctgtatctcctggaggaatcaacaaaatctagtaaataaaaacgattaaataatatgaaattcgttgctttacggttttttagaaattttctccgtaacaattgggcggcaagatacatttatatggaaaatacatcagtgatcgggatcccaaatgcaataatccactttaaatctgaacgtttttagcccaacagtctgtttatggtgatcagccagataaatgtggcgcgaaggctatcatttgcagcacatgagataaaagctctgttaccaaataacgaggtttttgctgcaaaaaagtgatgtaaacgacgttttttcgccagaatgttatttttatggtgaattttattgctctttttggaaacgcaaacgtttgtctatgtggaaactctacgaatcattaattagaaaaattaattaactggaaattgaggacgggggtgtccgggcagggtatcgaccgccgcccgggagaggtatcacgttatcaggagcagatttcgtagcacggaatgtaggcgctgccgcccggaagcttcatgcggtgctgggcaacgaagccctgcagcagatcgtccatgcggcgcatcatttccggatcgccatgcagcttgtaagggccatatttctcgatggcctgaataccgacttctttcacgttgccggcgacaatcccggagaaggcgcgacgcaggtcggcggccagcacttccaccggttggtccggataaagtttgagattggccatattgtcgtgcgtcggatcgaacggcatctgcaggtccggcgaaatacgaatcgaccagttgaagctgtaggcgtcgtcggtttcgcggcggctctctttgaccaatggcatcgcttttttcatctggcgcgccacttccgcggcatcgtcaataataatgcgatagtggcggcgagccgattcgccgagggtatgaacgatgaactcgtccagcacgcggaagtagtcggcgctctctttcggcccggtgaggataagcggcagcacctgcgccttgttatccggatgcatcaggatgcccagcagataaagcagctcttccgcagtacccacgccgccggggaagatgataataccgtgggcgatgcgcacgaacgcttcgagacgcttttcgatgtccggcatgatgatcagttcgttgaccagcgggtttggcggctcagcggcgataatggagggttcggtcatgccgataaagcggctgtctttatagcgctgctgggcgtggccgacggcggcgcctttcattggcgcttccatggcgcctggcccgcagccggtgcagatgttcagttcgcgcaggccaagctgggtaccgacgcggcgcgcgtacaggtattcattttcattaatagagtggccgccccagcagacaatcatattcggcgcttcgccgacgtgcagcgcgcgggcgttgcgcagaatcgagaacaccaggttggtgatatgaattgagctttcgagatcgagattcgggaagcggacggtgttgtggatctgcccgtagacgaacaagatatcgcgcagcacggcaaacaggttggcctgcagggaacggataatacggccatcgacgaaagcgtcttccggcgggttgatcagttccagcttcacgccgcgttcgcggcgcagcacgttaatatcgaagttttcaaaacgagacagtagctccttgctgttatcggtcaggctccccgagttgagcacagcaagcgagcagttgcgaaagagttgatacaggtcactactggcggtgcgtttaagcatatccacttccagctgtgacagcatatccattgaaccaagcgggctaacgtgtgtaatcaagtgaactccttacaggacgattatcgtcttcctgtgattacaatagccctggccgtagtatttccacaaccttgcgtacgcgttaacgcacgcaaagtgtgaaaaatatcgcttattgccgcgccagacggccggttgccggcacgaattcaccgttgctgcgccacggattgatatccaggccgccgcggcgggtgtagcgagcgtacacggaaagcgattccgggcggcagaaacgcagcacatcattaaagatgcgttcgacgcactgttcgtggaattcattgtggtggcggaacgacaccagatagcgcagcagtttttcgcgatcgattttcggcccgcgatactgaatctgtaccgagccccagtccggctggtgggtgatcagacaattcgatttcaacagatggctgaccagcgtctcttcgacgactttaccgctggccgcgtcctgcaggtagtcggcgctgaactgatagttatcaatctcgatatcctgatcgtcgatgcaggtgccatgcagatgagcgaccggttgcccttcaagctcatcgagtcggtacagcgaaaccttgacctcgccctgggcgcaggcgctgagatcgcgggtcagcgtggcctgaacttcctgccagtcggcgaagcgggtctggttgaagctgttcaggtacagtttgaagcttttcgattccaccagattgatggtggtatcgctcagttccacgtagccgacggcgacctgcggcaggcctttggcgttcagccacgacagttcgtacagcgtccagatatcggcgccgtggaacggcagattatcggcatgcaggccgagcggatcgcggttcaggctgcggggcacgccctgcagcaacgaagcgtcataggtatcgcggtaatccgttgatttaccgagcgtcaggccggccagcgcctgatgattatcgtaagaagacatgtttcaccatagtaaagcgggtacactatatgccaagtgtatcctgtctaacgtgaagagagaaaccggtggatcatcagaccatagaagcgctgcaatcatttacccaacgttactgcgatgcgtggcagcagcgttatgccagcctgccgcgtagcgaagacctttatggcatcccatctccctgtattagcgccagtgaagacgatgccgttttctggcagccgcagccgtttacgttagaacaccatctcgatggggttgaacgggcgctggagattgtggtacaacagccgattcatagttattataccactcagttcgctggcgatatgcacgcccgcttcgcggaacagaacctcactctgctgcaggcatggagcccggatgatttccagcgagtacaggaaaacctcattggtcacctggtggtacaaaaacgtctgaagctatcgccgacgctgtttatcgccacgctggatagcgaactggaggttatttcggtctgtaacctgagcggcgaagtgattaaagagacgctcggtacccgaaaaagagagaccctttctcactcgcttgcgagtttcctgaatcagcttgagccccttctgtaatccatttccccaagttgtttgtgagagatctcttacaagacctgtaagagatcgtcatcattttcagcaattttttacgcagtgattacatataactcattgttatttaatgatttgatgattgtgtgcgcttttagtttggccactaatcttaagagattgtcgtagtaagtcttgtaagaagaggcggaatcagtgatcctatgtacgtcgacaggaagtcgcggatgaagagaacatcaggatgatggctcttctacaggacccgccaggatggcgttgcaaggacaggcttcaggatgaagcaaggataacgcaggaaagcgtaaaggacacctccaggagggagaacgagagccgctcaggatgaacggtggatcaggaagatctggacacacttagggataagttatttcacatcggggtggtgtgaaagcaggatgcgctagtttatggatgaacttggtcaggagacctcaggaaaagttttcaaggacgagcagggagcaccaatgtagctggaatgctgcaaaacgaaccgggagcactgtttatacagtgctccctttttttatttctctcgcggatttgctatcctgcgcccggtttacaattcatcgaggtttccccatgacccttcacgctagcgtgcgcgatcgcctgcacgccattgaagcgctgctgcgcgaaacaaaccactggcaggaacaggccccggatagccgcgctttcgccagcgagcagccgttttgcctggacacgctcgagccgctggaatggctacagtgggtgctgatcccacgtatgcatcaactgattgccagcggtatgccgctgccgcagaactttgccgtcgcgccctattacgagatggcgctggataaagcccatccggcgcgcgaagctatcgtggccgagttgctgctgctggatgcattattcgcggatgaagacgcctgatgctggagatcatttaccaggataagtggctggtggcggtgaacaaaccatccggctggttggtgcaccgcagctggctggatcgcgacgagaaagtggtagtgatgcagactgtgcgcgatcaaatcggccagcacgtcttcaccgctcatcgcctggaccggccgacttccggcgtgctgttgatggggttgtcgagcgaggcgggcaggctgctggcgcagcagtttgaacaacaccagatgcaaaaacgctatcacgccatcgttcgcggctggttgactgaaaaggcggtactggattatccgcttgtagaagagctggataaaatcgccgataaattcgctcgtgaagataaaggcccgcagccggcggtgacccactatcgcgggctggcgacggtagaaatgccggtcgccaccggccgttacccgaccacccgctacgggctggtggagctggagccgaaaaccgggcgtaagcatcagctgcgtcgccatttggcccatctgcgccatccgatcctcggcgacagcaaacatggcgatctacggcaaaaccgcagcgccgctgaacatttcggctgtaatcgcctgatgctgcatgccagtcagctgtcattaacgcatccgtttaccggcgagccgctgacgattcgcgcgggtctggatgatgtctggatgcgcgcgctgtcgcagtttggctggcgcgggcttctcccgttaaatgaaagggttgagtttgccgacgacagcggtcaggatgagagtatcgcggataatccagggagataatcacatggcagaagtcggaatttttgtcggcacgatgtacggaaactcgctgttggtcgccgaagaggcggaagccattctgagcgggctggggcataaagcgacggtctttgaggacccggaagtaaaagactgggaatcctataccggcaaatacgtgctggtcgtgacctcgaccaccgggcagggcgatctgccggacagcatcgttccgctgtatgaaggcattaaagatatgtatcaaccgcatctgcgctacggcattatcgcgcttggcgatagtacctacgccaacttctgcggcggcggtaaaacctttgatgcattgctgcaggagcagggcgcgcgtcgtattggcgagatgctcaccattgacgccagcgaagacccggaaccggaaagcgtttccaacccttgggtagaagcgtgggctaaactgctcgactaatcctattaagaacgccctctccctacgtagagggcgcgcttaagctgccagtggccggataaacggtcagggttatcttaacgttatccatcgcgcccggcttcgggcatctgcctgataaccactttatcgatatggcttttttctttgcgtttccccggcgtcaagagagccgattcacactctgaaggtaatgtcgtccatcgacccatcagcgggcggcggttttccatttccgtgaactactccccacaaccttaggcatacgccataaactaacgcagtatcacccgctaaagctgtgtatatgcacggtgagcccgccgacgcctctttttatacttttcctgccagtgacaaaagcagtacgccagatataacgaaaaaaacactaacacgtcattctgattaccctacaggttgtgctgttcagaatgaacgtagctaaacgctatgattcaggagtacaacgatgagttcattaagtcaggctgcgagcgccgctgaaaagcgcaccaatgctcgctattggatagtggtgatgctgtttatcgtcacatcctttaactatggcgaccgcgcgacgctgtcgatcgccggttctgaaatggccaaggatatcggcctcgatcctgttggcatgggttacgttttctccgcgttttcatgggcctatgtgatcggacagatcccaggcggctggctgcttgaccgctttggttctaaacgcgtctatttctggtccatctttatctggtccgtgtttaccctgctgcagggcttcgtggatatctttagcggctttggcattatcatcgcgctgtttaccctgcgcttcctcgtcggccttgccgaatcgccctcgttcccgggtaatagccgcattgtggccgcctggttcccggcgcaggagagagggacggcggtatcgatttttaactccgcgcagtattttgccaccgttattttcgcgccgattatgggttggttgacccatgaagtgggttggtcgcacgtattcttctttatgggcggattgggtattgtcatcagcttcgtgtggctgaaagtgatccacgatcccaataaccacccaggcgttaaccagaaagagctggactacatcgccgaaggcggcgcgttgatcaacatggatcagaagagcagtgcgcagaaggtgccctttagcgtaaaaatgggccaaatcaagcagttgatcggctcgcgaatgatggtcgggatctatatcggccagtactgcatcaacgcgttaacctacttctttatcacctggttcccggtttatctggtgcaggcgcgcggcatgtcgatcctcaaagcgggctttgtcgcctcgattccggcggtgtgtggctttgtcggcggcgtgttgggcgggattatttccgactggttgatgcgccgtaccggctcgctgaatatcgcacgtaaaacgccgatcgtactgggcatgctgttgtccatgaccatgctgatgtgtaactacgtcaacgcggaatggatgatcatcggctttatggcgatggccttcttcggaaaaggcattggcgcgctgggctgggcggtaatggcggacaccgcgccgaaagagatcagcggcctgtccggcggtctgttcaacatgttcggcaatatttccggcatcgtcacccctatcgctatcggctatatcgtcggcaccaccggctctttcaacggcgcgctgatttacgtcggtatccacgctctggtggcggtattcagctacctggtgctggttggcgatatcaaacgtatcgaacttaaaccgattgcggggcgttaatcatgaatacccaatccagcccaatcgttaccgaaatgaaggtgattccggtcgccgggcacgacagcatgctgatgaacatcggcggcgcgcataatgcctggtttacccgcaatattgtggtgttaaccgacaacgccggccataccggcgtcggcgaagcgcccggcggcgaagtcatctaccagacgttggtcgatgccataccccaggtggttgggcaggaagtcgctcgcctcaaccgcgtggtgcagcaggtacataaaggcaatcaggcggcggatttcgacaccttcggcaaaggggcatggaccttcgaattgaaagtcaatgcggtagcggcgctggaagccgcgctgctcgacctgcttggcaaggtgttgaatgtcccggtatgcgaactattggggctgggcaaacagcgtgatgcggtgaccgtgctgggctacctgttctatatcggcgaccgcgaaaaaaccgatctgggctatcttgcgcggacgccgggcgaccatgaatggtaccgtcttcgtcaccagcaggcgctgaatagcgacgcggtagtgcgactggcggaggcggcgcaggatcgctacggttttaaagactttaagctaaaaggcggcgtattacctggcgagcaggaaatcgacaccgcccgcgcgctgaaaaaacgtttccctgacgcgcgcattaccgttgacccgaacggcgcctggctgctggatgaagcgattacgctgtgccaagggctgcaggatgtcctgacctatgccgaagatccgtgcggcgctgaacagggcttttccggtcgggaagtgatggctgagttccgccgcgccaccgggttgccggtggcgactaacatgatagccaccaactggcgcgaaatggggcatgcggtcatgctcaacgccgtcgatattccgctggcggacccgcacttctggacgctctccggcgcggttcgggtggcgcagttgtgcgatgactgggggctgacctggggctgtcattcgaacaaccactttgatatttcgctggcgatgtttacccacgtcggcgccgcggcgccgggcaatccgactgctatcgatacccattggatttggcaggagggcgatgcgcgcctgacgcaaaatccgctgcagattatcaacggcaaaatcgccgtgccagacgcgccgggactcggcgtggagctggactgggaacaggtgcataaagctcatgaggcctataaggcgctgccaggcggcgcgcgtaacgatgcgggcccgatgcagtatctgattcccggttggacattcgaccgtaaacgccccgttttcggccgtcattaattaaaaaggattacgctatgactacatcatcttcaacgccaattgtgaccgctatgcaggttatcccggtcgccgggcatgacagcatgctgatgaacctgagcggcgcgcacgcgccgtacttcacccgtaatatcgttatcatcaaagataactccgggcacacgggcgttggcgaaatccccggcggcgaaaagatccgccagaccctggaagacgccgcgccgttggtggtgggtaaaacgctgggcgagtacaaaaatgtgctgagcgccgtgcgtaaccagtttgccgaccgcgatgccggcggccgcggcctgcaaaccttcgatctgcgcactaccattcacgtggtgaccgggattgaagcggcgctgctggatctgctgggccagcatctgggcgtgaacgttgcttctctgcttggcgacggccagcagcggagcgaagtcgaaatgttgggctacctgttctttgtcggtaaccgccacgcgacgccgctggcttatcaaagccagccggatgaacagtgcgactggtatcgtattcgtcatgaagaggcgatgacgccggaggcggtggttcgcctggcggaggccgcttacgaaaaatatggcttcaatgactttaaactgaagggcggggtgttggccggttttgaagaagccgaagcgattagcgcgctggcgaagcgtttccctgatgcgcgcgtgaccctcgacccgaacggcgcctggatgctggatgaagccatccagataggtaaacagctgaaaggcgtgctggcctatgcggaagatccttgcggcgctgaacaaggtttctccggccgcgaagtgatggccgaattccgtcgggcgaccgggctgccgaccgcgaccaacatgatcgccaccgactggcggcagatgggtcatacgctgtcgctacaatcggtggatattccgctggcagacccgcacttctggaccatgcaagggtcggtacgcgtggcgcagatgtgtcatgaattcggcctgacctggggttcgcactctaataatcacttcgacgtgtcgctggcgatgtttacccatgttgccgcggcggcgccgggtaaaattaccgctatcgatacccactggatctggcaggagggcaaccagcgtctgaccaaacagccgtttgaaatcaaaggcggtatggtgcaggtgccggcgacgccgggtctgggcgttgagctggatatggaccgcgtgatgcaggctaatgagctatataagaaacatggcctgggcgcgcgtgatgacgccatggcgatgcaatatttaatcccgaactggacctttgataacaaacgtccttgcatggttcgctaagataacgccgaccctgtaagggtcggcaactgccggtcgccggggttattcatattaaggacacttatgaagatagtgatcgcgccggattcttacaaagagagcctgagtgcgctggacgtcgccaccgcgatagaaacggggttccgcgaaatttatccccatgcggagtacgttaaagtcccggttgccgacggcggcgagggtaccgttgaggcgatggtggccgcgactcaagggcatatcgtacaggtcagcgttaccgggccgcttggcgagccggtcaacgccttttacggcctctccggcgatatgcgctgcgcctatatcgaaatggcggcagccagcggactggaaagcgtgccgcccacgcgacgtaatccgctactgaccacctcatggggaaccggcgagctgattcgtcacgcgttggatgcgggggtttcgcagattattattggcatcggcggcagtgcgaccaatgacggcggcgccggcatggcgcaggcgctgggagcaaaactgttgagcgccgggcaacagcaaattgcgcggggcggcggcgcgctggagacgctggctcggatcgatctcagcgaactggatccaagattggcggattgccggattgatgtcgcctgcgacgttaccaatccgttaaccggcccgcagggcgcaagcgcggtgtttggcccgcaaaaaggggcgacggcggcgatgattgagcgtcttgaccgcggcctgcaacactttgcgcagattatcgaccgtgatttagatattgacgtgctgagcctggaagggggcggcgcggcgggtggtatgggggcggcgttgtatgcgttttgcggcgccaacctacgtccgggaattgagattgtgaccgatgcgctggggttggcggatttagtggctgatgccgatttagtaattaccggcgaaggtcgcatcgacagccagaccattcacggcaaggtaccggtgggggtggcgaaggttgcgaaacgcttcaacgtgccggtgattgggattgccggcagcctgaccgccgatgttggcgtcgtgcatcagcatggcctcgatgccgtctttagcgtgctctattccgtctgtaccctggaagaggcgctggcgaacgccgccgccaacgtgcggatgacggcacgtaacgtggccgcggtattgcagatgggcggtaagcggtaacccggccggcgcagtggtattggtagcccggataaggtgcgtagcgccgcgatccgggaaccctccccggtggcgcttacgcttaccgtggctaccaaccgagtaccggatcgtagcccggataaggcgcgcagcgccgctatccggggtttacactcccatcttgcacgcttcgcgggcgacgttatccatctcgtctaacagttccagtagctccggctccagctcttccggcgcggtacctgcgcgcaactggctttcaagggtatggcacagttttttcagccgcggtacgccgctatagctgcagctgccgtgcagtttatgaattaaatccagcaacccttccggcgtttcgccaaccagctgttcttcaactttatttcgaacctccggcataaaggcgagcagcatttgcagcatctcccgcgcgaggtctggtttcatggcagcctgacgcagcgccagctgccagttgagcgtgacgttatgatcgataaccggctccaccggttcggctaattgcggcgcggcgacgtgcatgccgggctgatagcgcaacagcagggtgctaagcttatcttcttcaatcggcttcgccagataatcgttcatcccggcggccagcagtttctcgcgctgcccctctagggcgtgggcggtcaccgcgatcaccggggtctgctgctgatgcgggagatggcggatcaattcacaggcgcgaatgccgtccatatccggcatttgaatatccatcagaatgagatccaactgcgactgtttggcctgctctacggcatcctggccgctatcgcacagaatgacatgctgcaccagatcgtccagcagcgcgccaataagcttgaggttggccgggttatcatctaccgccattaccgtcatcgccagtttatcgctatcgatatagggctgtggcaccggcggctgcgcgcggcaagaggccatcagcaccgggaaaagccgcgtggaggtcaatggtttaagcaggcaggcggtaacaccgtttcttttcagctcttcggcgctaacctgcgcgtggcaaggcagccccagcaccagggtatcggaaagtgagcaagcgcggaccagtttttcccgctggttgctgagatcgcgcatcgacaccggaataccggccagtaaaatatcgtagtgcgcatccggcagcgctgacagcgtcgggctgtagaccacttccagcggtgtggttgccagtagttccatcgtgctttgcgcagcggtggtattggcttcaatgtaggccagcttcttgcccgccaggcaatgggtatcgaaaccgtcggtaatggcgttcggattcaggtcaaggctgatatggaaccagaaggtggaaccgcggttcggctgactatggaatgagatatcgccgcccatctctttgaccagccgctgagtgataaccagccccaggccggtgccgccgtggcggcgtgagatactggcatcggcttggcggaaggcctggaacaaccgcgactgatcgcgctccggaatgccgatgccggtatcatgaatctgtacttcgatttgtactcgcgaattgctcatcgcccgctgttcaaccagcacatcaatgttgccgtgctcggtgaatttaatcgcgttacccaccagattggtgattacctgctgcaggcgcagcggatcgccaatcacattatccgggacatcgcttttaatgttgagggtgagctcaaggcctttatcgtgcgctgaatgtgccagcaaggtcaccacttcatccagggtattacgcagcaggaaaggaatgctttccagaatcagcttgcccgcttcgagcttggagaaatccagcacatcattgatgatggccagcagattattcgccgaacgttcgatggtggtcaggtggtcgcgctgggtagcgttgagatcggttttcaaggtcaggcgggtaaagccaatcacgccgttaagcggagttcgtagctcgtgcgacatattggcaaggaactcggacttgatgcgcgcggcctcctgggcgcgctttttcgccagatccagctcgacgttctgaatctccatctgctccagcgtttcgcgcagatccgaggtcgcctgatcgacattgtgctgcatctcctcgtggtaggccgccagcgacatcgccatcgagttaatgccgtttttcagcatatccaactcgccgagcataaaaccttcaacgcggctatccaactggccgcggcggatgcggtcaacggtgttgaccatattacgaatcggtccggtcacgtcgcgcatcaggcgccagccgaaaatcagcgcaatgccgatacaaaacagcatcatgacgcttgagataaatatctctttgtactgctgcaggcgcacagatttaaggtcgagctccagcgccacatagccgagcatattgtccggcattttagcatcgctttccggcgactcatcgggcagatagctttctgacacaataggcgtgcgcagcaccatgatgtcgccgtggcgggtgacgctcagccggcgagggaagggcgcgccgcgcgggagctgtatttcccgcggatcgagctggaagttagaggtaacgaacagccggtttttagcatcataaatagaaatagcccgcacgatatcggaatggcggcggtgaagcacgctgataagttggccgatcgcctcgcgattttgcaaattcatgccgtactcactggataccgccagcggttcgataatactggcgccggcatcttccaactgccgctgcaggtcgttatagcggtgggcaacgaagaaaatactgagcagcagaccaatcaaaacggtcggcgccagaataagaatcatcatgcgagcacgtaggctgtagttggtcatgcggttccattatgggagaatatacatatcaaccttcagacggcttctgcattggtagcccgaatgatttcatgtatagagtcagtatatttttgagataatcctctacgatggcgcaattctactctgcaaaacggcgtgtgacgacgcgccagatcataaccgtgacggtaaatgaccttgatccctttggccagggcgtagcccgtcatcagggtaaggcgctgtttatccccggcctgttgccgcaagagcaggcggaagtcgtgctggtagaggataaaaaacagtatgcccgcgctcaggttaaacgccgcctcaacgacagtccacagcgcgttgcaccgcgctgcccgcatttcggcgtctgcggcggatgtcagcagcaacatgcgagcattgaactacagcagcaaagcaagcgcgccgcgctctcccgcctgatgaaacgtgacgttgacgacattatagccgctgaaccctggggctaccggcgtcgggcgcgtttgagcttgaattatcagccaaagacccaacaactgcagatgggttttcgcaaggccaactccagcgaaatcatcgatgtggtgcagtgccccgttttggtgccccaacttgaggcgttgttacccgcggtgcgcgagtgtttaaccagcctacaatcacaacgtcaacttggccacgttgaactggtgcaggcggataatggcccgctgatggttttacgccataccgccgcgctgacggcggcggataaagaaaaactggaacgtttttcgcaaactcacggtctatccctgtacctcgcgccgcaaagcgagatacttgaacatattcgcggcgatgaaccatggtacacgtcagacggactacgcttagtgttcagtccgcgcgattttatccaggtaaacgatggcgtaaaccagaaaatggtgcgtacggcgctggcctggttagatattcagccgcaggaccgcgttctggatctgttttgcggtatgggcaatttcaccctgccgctggccaaagtggcggcgagcgtggtgggcgtcgaaggcgtacccgcgctggtggcaaaggggcgggaaaatgccgccctcaatgaattgcagaacgtgactttctttcatgaaaacctggaagaagatgttacccggcaggcctgggcgaagcatggctttgataaaattctactcgacccggcaagagccggggcgccgggcgtgatggcgcatattatcaagctggcaccgcggcggatggtctatgtttcatgtaacccggcgacgctggcgcgcgatagcgaagcgttgcttcaggcgggatatcgcattcaacgtctggcgatgctggacatgttcccgcacaccgggcacctggaatcgatagtattgtttgagcgcgagcttacataaaattgttcagcccgcatcgaggcgacagtgaagatgcctgatggcggtgtggactgaaggatgaagtatgacgggtataaaatacggcttgctgacttcggtaggctgagtcccttaaggagaggacaatggttgcggtaagaagtgcacatcttaataaagctggtgagtttgacccgaagaaatggatcgcgagtctggggatttccagccagcagtcgtgtgagcgcttagccgagacctgggattattgtcgcgtaacaacgcagggacacccgcaggcggatctcctgctttggcgcggcgtggagatggtagaaattctctccatgctcaatatggatatcgataccttgcgggccgctttactgtttccgctggcggacggcaacgtcgtcagcgaagaggtcctgcaagagagcgttggcaaatccgtcgttaccctgattcacggcgtgcgtgatatggcggcgattcgccagcttaaagccacgcacaccgacaccgtctcctcagaacaggtcgacaatattcgccgcatgctgctggcgatggtcgatgatttccgctgcgtggttatcaagcttgcggaacgtatcgctcacctgcgcgaggtaaaagatgaacccgaagatgagcgcgtactggcagcaaaagaatgtaccaacatctatgcgccgctggcgaaccgcttaggcatcggtcaactgaagtgggaactggaagactactgcttccgttacctgcatccagccgaatataagcgtattgctaagttgctgcacgaacgccgtatcgaccgcgaacattacatcgatgagttcgtcggccacctgcgttcagaaatgaaaaatgaaggcgtgaaggctgaggtatacgggcgtccgaagcatatctatagcatctggcgcaaaatgcagaagaagcatctcgcttttgatgagctgtttgacgtgcgcgcggtacgtatcgtcgctgaacgtttgcaggattgctacgcggcgctggggatcgtgcatacccactatcgtcatctgcctgacgaatttgatgattacgtcgccaacccgaaaccgaacggctaccagtctattcacaccgtggtgcttgggccgggcgggaaaacggttgagatccaaattcgcaccaaacagatgcatgaagacgccgagctcggcgtggcggcgcactggaagtataaagagggcgccagcgccggggcgagcggcggtcgcggccatgaagaccgtatcgcctggctgcgtaagctgatcgcctggcaggaagagatggccgattccggcgaaatgctcgacgaagtgcgcagccaggtcttcgatgaccgggtctacgtgtttacgccgaagggcgacgtggttgatctgccggcgggctcaactccgctcgactttgcctaccatatccatagcgatgtcgggcaccgctgcatcggcgccaaaattggcgggcgcattgtgccgttcacctatcagctgcagatgggcgatcagattgagataatcacccagaagcagccgaacccaagccgcgactggctgaacccgaaccttggctacgtgaccaccagccgtggacgctccaaaattcacgcctggttccgtaaacaggatcgcgataaaaacattctcgccgggcggcagatccttgacgatgagctcgagcatctgggcatcagcctgaaggatgccgagaaacatctgctgccgcgctacaactttaatgaactggatgaactgctggcggctatcggcggcggcgatattcgccttaaccagatggtcaacttcctgcaggcgcagttcaacaaaccgagcgccgccgagcaggatgccgccgcgctgaagcaactgcagcaaaaaacctacaccccgcagaaccgcagcaaagataatggccgggtggtggttgagggcgtcggcaatctgatgcatcacattgcccgctgctgccagccgatccccggcgacgaaatcgtcggctttatcacccaggggcgcgggatttcagtacaccgcgccgactgcgatcagctggctgagctgcagtctcacgcgccggaacgcatcgttgatgcggtatggggcgagagctattcggcgggatattcgctggtggtgcgcgtggtcgccaacgaccgcagcggcctgctgcgcgacattaccactattcttgctaacgagaaggtgaacgtgctgggggtggccagccgcagcgataccaaacagcagctggcgaccatcgatatgaccattgaaatctacaacctgcaggtgttgggccgggtgctcggcaagctgaaccaggtgccggatgtgatcgacgcgcgtcgtctgcacggcggttaattcgtctgtaggccggataaggcatagatgccttatccggcctactatttttaaatttccaggattgttacatgactcaaattgaccgcctgctcggtattatgcgtcgcctgcgcgacccggaaaacggctgcccgtgggataaagaacagacctttgccactatcgccccttatacccttgaagagacctatgaagtgctggacgccattgcgcgcgaagattttgacgatctgcgcggcgagcttggcgatctgctgttccaggtggtgttctatgcgcagatggcgcaggaagaagggcgttttgatttcaacgatatctgcgccgccatcagcgacaaactggaacgtcgtcatccgcatatctttggcgatgcttcggccgggaacagtgcggaagtgctggcgcgctgggagcagattaagagcgcggaacgagcggaaaaggcgcaacactcggcgctggatgatattccgcatagcctgccggcgctgatgcgcgcgcataaaattcagcgtcgctgctcggctgtgggctttgactggacctcgcttggcccggtgctcgataaagtgcatgaagagatagatgaagtcatgcatgaagcgcagcaggcggtggttgatgacgctaaacttgaggaagaagtgggcgatttgctgttcgccacggtgaatttgtcccgtcatttaggggttaaagccgaggtcgcattgcagaaagcgaacctcaaatttgagcgccgcttccgcgaagttgagcggattgtcgccgccagaggtctggaaatgaccggcgttgacctcgaaaccatggaagaagtatggcaggaagtaaaacgccaggaaactgatctctaacgagttttcgtgatcaagcgctatttgtgtgattttataaataacaagcgcttgatttacgtcaaaaacatttcgccaaaagcggctattttctcattccgttatgttgttgaaacaccatgtagcctgcctcttcgagttgttcgagtcgcaacgcaggtgcggctggtagaaagaagaggaggggagaatgaaagtttgtggcgtcacgcatgttcgggtatactactttcccgtcctggttattccatcgttttaccctaacttctcaggttcagcatgacaacgaactatatttttgtgaccggcggggtcgtatcctctctgggtaaaggcattgccgcagcttccctggcagccattcttgaagcccgtgggctcaatgtaactatcatgaaactggatccgtacatcaacgtcgatccgggcaccatgagcccaatccagcacggggaagtgttcgttactgaagacggcgctgaaaccgatctggacctgggtcactacgagcgtttcatccgcaccaagatgactcgccgcaacaacttcaccaccggtcgaatctactccgacgttctgcgtaaagagcgccgtggcgactatctgggcgcaaccgtacaggttatcccgcacatcaccaacgccatcaaagagcgcgtactggctggcggcgaaggccatgacgtggttctggttgaaatcggcggtaccgtaggcaatatcaaatccctgccgttcctcgaacctattcgcccaaatggcgtagaaaacggccgtgagcataccctgttcatgcacttgaccctggtgccatacatggcggcggcgggtgaagtcaaaactaaaccgactcagcactctgttaaagagctgctctccatcggtatccagccagatatcctgatttgccgctccgatcgcgcggttccggccaacgaacgtgcaaaaattgcattgttctgtaacgtcccggaaaaggctgtgatttctctgaaagacgtcgattccatttataaaattccaggcctgttgaaatctcaggggctggacgattatatttgtaaacgattcagcttaacttgtccggaagcaaacctggccgaatgggaacaggtaatctatgaagaagctaacccggcaggcgaagtcaccattggtatggttggtaagtacattgaactgccggatgcctacaaatcggtgattgaagcgctgaaacacggtggtctgaaaaaccgcgtgaccgtcaacatcaagcttatcgattcgcaagatgttgaaacgcgcggcgtcgaaatccttaaagatttggacgcgatcctcatcccgggcggcttcggctaccgcggcgttgaaggtaagatcgccaccgcgcgctatgcgcgtgagaacaatattccatatctgggtatctgcctgggtatgcaggttgcgctgattgagttcgcgcgcaacgtagcgggcatggaaaacgccaactctacggaatttgtgccagactgtaagtacccggtggtggcgctgattaccgaatggcgtgacgaagaaggcaacgttgaagttcgttccgagaagagcgacctcggcggcaccatgcgccttggcgcgcagcagtgccagctgggtgatgattcactggtccgtcagctgtacggcgagccgactatcaccgagcgccatcgtcaccgctacgaagtcaacaacatgttgttgaaaccgattgaagctgccggcctgcgcgttgcgggccgttccggggatgatcagttggtcgagatcatcgaagtgccgaaccatccgtggtttgtggcctgccagttccacccggaatttacttcgacgccgcgtgacggccacccgctgtttgccggctttgtgaaagccgcgagcgagtaccagaagcgtcaggcgaagtaaaaagagttagaacggcaatgcacccaattgggtgcattgtttgtctggagttttagtttaacttgtactgaggaaaacctaatgtccaaaatcgttaaagtcatcggtcgtgaaatcatcgactcccgtggtaacccgactgttgaagccgaagtacacctggaaggtggtttcgtcggtatggcagctgctccgtcaggtgcttctactggttcccgcgaagcgctggaactgcgcgatggcgacaaatcccgtttcctgggtaaaggcgtaaccaaagctgttgctgcggtaaacggcccgatcgctcaggcagtcctgggtaaagatgctaaagatcaagctggcatcgataagatcatgatcgacctggacggtactgaaaacaaatccaacttcggtgcgaacgcaatcctggcggtatccctggcgaacgccaaagcagcagctgcttctaaaggccagccgctgttcgaacacattgctgaactgaacggcactccgggcaaatactctatgccggttccgatgatgaacatcatcaacggtggtgagcacgctgacaacaacgtcgacatccaggaattcatgattcagccggttggcgcgccgactctgaaagaagccgtacgcatgggttctgaagtgttccatcacctggcgaaagttctgaaatccaaaggtatgaacactgcagttggtgacgaaggcggctacgcgccgaacctgggttccaacgccgaagcgctggctgttatcgctgaagcggttaaagcagcaggctacgaactgggcaaagacatcactctggcgatggactgcgcagcttctgaattctacaaagacggtaaatacgttctggctggcgaaggcaacaaagcgttcacctctgaagagttcacccacttcctggaagagctgaccaaacagtacccgatcgtctccatcgaagatggtctggacgagtctgactgggacggtttcgcataccagaccaaagtactgggcgacaaaatccagctggttggtgacgatctgttcgtaaccaacaccaagatcctgaaagaaggcatcgaaaaaggcatcgctaactccatcctgatcaaattcaaccagatcggttctctgaccgaaactctggctgcaatcaagatggcgaaagacgctggctacaccgctgtcatctctcaccgttctggcgaaactgaagacgctaccatcgctgacctggctgttggtaccgctgcaggccagatcaaaactggttctatgagccgttctgaccgcgttgctaaatacaaccagctgattcgtatcgaagaagcgctgggtgaaaaagcgccgtacaacggtcgtaaagagatcaaaggccaggcataatcctgactttttgtgaaataaaaatgccagtctgcggactggcattttttttacctgcgcattgtgtttacttaaaatcgacggccatttgctgcgggatagagagcccgcgggtggtttgtacgcagcggtcgatataatcggtgaaacgcggcggtttaggcatgcccatgctcagcagcttatcattgctgaagcggacgttcagcgtcgcgaaggcgccatacaggcgcatcgctttgagcatcaggcgctcgttgcacgggccaaaaatatctttcaactcacggcgcattttaaccagcgtctcgtagctgacctgcgcgtatcggtcgcctaccggagcctgctccagcgctgaggccatcgcgcgatcgatttctgcaaatttcacgctgttttcttctccggcggagatatgcacgacttcaccacgcgccaacggacgttgtaataacatcagcagcgcgtcggcgcagtagtcgaccgggatcacgtcaacacggtcttccagggagcagaggaatttttgcagcatcagccccatgctgaacacccaaaaaatgctgcttgagggctggcaaccgtgatgagtatgaccaacgacgatagaagggcgggcgatggctaacggtaacgtcggacattgctcctgcatcaggcgctcaatggtcgatttggaatgggtatactccaccagatgctcggcgtgttcgcggaattcagcgctttcagcgaccagtgaatctggctccggggtacaggacatcgcggtcccgacgtgcagaaaacgttgtagtccagctacgcgggacatccgttgggcaaatttgaacgttccttcgacattcaccttccagatgagtgggttattaccaaatgaggcgacggcggcgctgttgatcacgtgagtgacctgctccaggcgcgggtcgctcaggaacgtctccggtgatgacaaatcgccgagcaagatctgccggggggttaatgcggccagcttctcctctgcaatattgaatttacgcaggttttccttcacccgggccagagccgcttcatcgttattggctcgcaccaggagcagtagattaatcccattttcattattgaggatattctctaataccgcgccgcccagaaatccggtaacgcctgtaattaataatgtattcatgaatgcagtctctcatggttggtcgactggattctaggcgcggaaaattaaacggagattaaataaaaacaggcggcaacaagcgctttcttaagcttattttaagctatggaaatcaagtgaattgaatttgaccctgagcgaagttaaaagattcattgtttcatgtatcggtttgtacatcattgattaataatttctttttattgctttggacagcgatgaataatgtcattacgatcatcaaagacattctttgttacatctttacccgcgcgcagatacatctgaagaaagtaataaataatccaattcaatgaccaagtgcggcgcatgctaaaataatactcaaaatatcgtaaatacattttgtgcttattttatagtttgctagctaatataaaaagatggcttacgaaaagctgacgatggggtctggtaatcgcagctgaggacaagacctgagcgcctgaatctgcgataatacctttttaccacctgaacagagatgactatgcagtacccgattaacgagatgttccagaccttgcaaggcgagggttactttaccggcgtgcctgccatttttattcgtttgcagggatgcccggttggttgcgcctggtgcgataccaaacatacctgggataagctggccgatcgggaagtgtctctatttagtatcctcgctaaaaccaaagagagcgataagtggggcccggcgaccagcgacgatctgctggcgatcattggccgtcagggatggaccgcccgtcacgtcgtgattaccggcggcgagccctgtattcacgatctcacgccgttgaccgatctgcttgagcaacatggtttcagctgccagattgaaaccagcggcacgcatgaagtgcgctgcagccacaacacctgggtcacggtctcgccgaaagtgaacatgcgcggcggctatgatgtgctttcgcaggcgctgcagcgcgccgatgaaatcaagcatccggttggccgcgtgcgcgatatcgaagcgctggatgaactgctggagacgctggccgatgaaaagccgcgtattattgccttgcagccgattagccaaaaagaagatgccacgcggctgtgcattgagacctgtatcgcccgaaactggcgcttatccatgcagacgcataaatacctgaacatcgcctgatcccctctttcattgccgggtaggttgcttaccgcccggcagctctcttcttcatatatgaattcatctttgcactcgatttcagcgccggggttgagatacgccttcatgacagcagtgctatcattggcgcattaattcagccgcctgaagcgggcggctgatacgttgacttaaggaacgagttaaccatgcagccaattgaaccacccactgccttctctatggatttcttctcgctcaaggggaaaaccgctatcgttaccggtggtaatagcggcctggggcaggcctttgccgttgctctggcgaccgccggtgcgaatctgtttgttcccgctctgcgcgaagaatacacgcaaacccgcaaacttatcgaacagcagggcgttgagctggaattcatgctggcggatatcaccgatggcggtatgccgcagcggattatcgccgcctgctgcgaacgtttcggtactgttgatattctggtgaacaatgccggtatttgtcagttgaataaggtgctgcgctttgggcgaacagactgggatccgatgatcgagactaacctgaccgcagcgttcgagctcagccacgaagccgcgaaaattatggttccgcggcgaagcggtaagattattaatatctgttcggtgttttcttatcttggcggcagctggtcgccggcctatgccgtcaccaagcatgcgctggctggcttaaccaaagcctactgcgatgagctgggcccgcataatattcaggttaacggcatcgcgcctggctattacgaaactgccatgaccgctatcacccgcagtatcccaaaggagaaccgacgcgtacttgcgcatatacccgcaggccgttggggagaagcgcaggatttaatgggcgccgttgtgttcctcgccagccgggcctcggattacgttaacggtcatattctggcggtggatggcggctatctggtgcgttgattccaacggcgtgggatgaaacagaaaaccgccatggcagcagcccgatggcggatagacagggcattactcgccgcgatagacgcagcctgcggtgcaggtctcttttaccattaccgcgctcagcagaggaaccagcggtttcatttgatcccaaatccatttggccagcacttcgctggttgggttctccagtcctgggatatcgttcaggtaatagtggtctaaacgatcgtaggtcggtttaaacgcggctttcagctcggcgaaatccatgatccacccggtatggggatcgacttcaccggtaatctccagacgcaccataaaagagtgaccatgcaggcgaccgcatttgtggcctttcggtacgtgcggcaggtggtgggcggcttcgaaggtgaaatctttaaacagcgtggtggacatcattaactctcaacaggacgaaaaaaaccgccgtagggtaccggaaagtacattttttagcattaactaaaacggccctgaacgcaaaatcgccatttttgtggtgttttgatgatttaatttattatttttcaacaggttaactaatcgtttttgttgttaataactataactaaaacaggttagtccatttggttatttgttatttccatcccttctttaattgttagtatgcccgccgttaaccttacaatctcttctgtttttgtcgcgctgacagggcgtgaataacagctttgcttactggaacataacgacgcatgacgacacaggccccaccttccaatctgctgccgctaaacccggagcaactggcgcgcctacaggcggccacgactgactttacgccaacccaactggcttgggtgtccggctacttctggggcatgctgaatcagcagcccggcgccgtggtaagcgcgcccgctcaggcggtagaagcgccggccatcaccctgatttccgcttcgcagaccggcaacgcgcgtcgggttgccgaagcgctgcgcgacgatttgcaggccgcgcagctgaacgtgaaactggtgaacgctggcgactataaattcaaacaaatcgccggtgaaaaactgctggtagtggtgacgtcgactcagggtgaaggtgagccgccggaagaagccgtcgcattgcataagttcttgttttcaaagaaagcgccgaagctcgatggcaccgccttcgcggtgtttggcctcggcgatacctcctatgagtttttctgccagtccggcaaagatttcgatagcaaactggccgaactgggtggcgaacgcctgctagaccgcgttgatgccgacgttgaatatcaagccgcggcggcggaatggcgcgctcgcgtagtggatgtgctgaaagcgcgcgcgccgacggctgcgcctgcccagcttgcgaccagcggcgccgtgaatgaaattcataccagtccgtatactaaagaagcgccgctgacggcgacgcttgctgtgaatcaaaaaataaccggtcgcgactcggaaaaagatgtccgtcatattgagatcgatctgggtgattccggcctgcgttatcagccgggagatgcgctaggcgtgtggtatcagaacgatccggcgctggtcaaagagctggtggagctgctgtggttgaagggtgatgaaccggtcactgtagaaggcaaaacgctgccgctggcgcaagcgctggagtggcatttcgagctgacggtcaataccgccaatattgttgagaactatgccaccctgacccgcagtgaaacgctgctgccgctggttggcgataaagcgcagttgcagcactacgctgcgacaacacctatcgtcgatatggtgcgcttctcgccggcacagctggatgccgaagccttaatcggcctgctgcgcccgctgacgccgcgcctctactctattgcgtcctcacaggcggaagcggaaaacgaagtccacgttaccgttggcgtcgtgcgttatgacatcgaaggccgcgctcgcgccggcggcgcgtccagcttcctcgccgaccgcgtggaagaagatggcgaagtgcgcatctttatcgaacacaatgacaatttccgtctgcctgctaacccgcaaaccccggttatcatgattggtcctggaaccgggatcgcgccgttccgcgccttcatgcagcagcgcgcggcggaaggggcggaagggaagaactggttgttcttcggcaatccgcacttcacggaagatttcctctatcaggtggaatggcagagctacgtcaaagagggcgtgctgagccgtatcgacctggcctggtctcgcgatcaacaacaaaaaatctatgtacaggacaaactgcgcgagcagggggctgaagtgtggcgttggattaacgacggcgcccatatttatgtctgcggcgatgccaatcgtatggcgaaagacgtcgagcaggcgttactggaagtgattgccgaatacggcgcgatggacgccgaagcggcggacgaatttttaagtgagctgcgcgttgagcgccgttatcagcgagatgtctactaatgagcgaaaaacatcctggcccgctggtggtcgaaggtaaactctccgacgccgagcgtatgaagatcgagagcaactacctgcgcggcaccatcgcggaagatttaaatgacggcctgaccggcggttttaaaggcgacaacttcctgctcatccgcttccacggtatgtaccagcaggacgaccgcgatattcgcgcggaacgcgcggcgcagaaactggagccgcgccacgcgatgctgctgcgctgccgtctgccgggcggcgttatcaccaccaaacagtggcaggcgatcgataaattcgccgcggataacaccatctacggcagtattcgcctgaccaaccgtcagactttccagttccacggtattctgaagaagaacgtgaagccggtgcatcagatgctgcactccgttggcctggacgcgctggcgaccgccaacgacatgaaccgcaatgtgctgtgcacctcgaacccgtttgagtcgcagctgcacgccgaagcctacgagtgggcgaagaagatctctgaacatctgctgccgcgtacccgcgcctatgctgagatctggttggatcaggaaaaggtcgccaccaccgacgaggaaccgatcctcggccagacctatctgccgcgtaaattcaaaacgacggtggtgatcccgccgcagaacgatatcgatctgcacgccaatgatatgaacttcgtggcgatagcggaaaacggcaagctggtcggctttaacctgctggtgggcggcgggttgtctatcgagcacggtaataagaaaacctatgcgcgtaccgccagcgagtttggctatctgccgctggagcataccctggcagtggcggaagcggtcgtgaccacccagcgcgactggggtaatcgtaccgatcgtaaaaacgcgaaaaccaaatatacccttgagcgcgtcggcgtggagaccttcaaggcggaagttgagcgtcgtgccgggatcaaattcgaaccgattcgtccgtacgaatttaccggccgcggcgaccgcatcggctgggttaagggtatcgataataactggcacctgacgctgtttattgagaacggccgtattctggattatccgggccgcccgctgaaaactggtctgctggagatcgcgaagattcacaaaggtgaattccgtatcaccgccaaccagaacctgatcatcgccagcgtaccggaagatcagaaagcgcggatcgagaaactggcccgcgatcatggcctgatgaatgccgtcacggcgcagcgtgagaactcaatggcctgcgtgtcgttcccgacctgtccgttagcgatggccgaagccgagcgtttcttgccgtcgtttatcgacaaggtcgaagaggtgatgagcaagcacggcgttggcgatgagcatatcgtaacccgcgtcacgggttgcccgaacggctgtggccgcgcgatgctggcggaagttggcctggtgggtaaagcccctggccgctataacctgcatatcggcggcaaccgcagcgggacgcgcattccacgaatgtatcgtgaaaatatcaccgagccggagatccttgcttcgctcgacgagctggtagggcgctgggcgaaagagcgcgaagcgggtgaaggcttcggcgactttacggtgcgtgcgggcatcattcgcccggtgctcgacccggcgcgtgatttctgggaataacctgaattgccggatagcggcatgaatgctttatcaggcctaccgttcgcgtaggcctgataagcgaagcgccatcaggcaaggcacacagtgaggaatctatgtccaaactcgatctaaacgcgctgaacgatctgcctaaagtagaacgcgtcatggcgctggcggaagttaacactcagctggaaaaactcagcgccgaagaacgcgtggcgtgggcgctggaaaacctgcccggcgactatgcgctctcttcaagctttggtattcaggcggcagtcagcctgcatctggtgaaccagctgcgcccggacattccggtgatcctgaccgataccggctatctgttcccggaaacctatcagtttattgatgaattgaccgagaagctcaacctgaaccttaaagtctaccgggcgacggaaagcgccgcctggcaggaagcgcgttacggcaaactgtgggagcagggcgttgaaggcattgagaagtacaatgaaatcaacaaagttgagccgatgaaccgggcgctgaaggagctcaacacccgcacctggtttgctggcctgcgccgcgagcagtccggcagccgggcgcatttaccggtgctggctatccagcgcggcgtctttaagctgctgccgattatcgactgggataaccggacggtttatcagtatctgcaaaagcacggcctgaaataccacccgctatgggagcaggggtatttgtccgttggtgacactcacactacccgtaaatgggaacccggtatggcggaagaagaaacccgattctttggcctcaagcgggagtgcggattgcacgaaggctaagcgatgcgctatgccggagagtgttattccaaagcggacacgcgggctataccgcgggttcgctttgcacaaatcactttttcttctcaactttcgccagctctttcaccagcggcagcatcactttcactacatcgcgcccgcggtgctcgatccttcccggcagcgctttgtcgatatactgttggttatccagttgtacatcatgccagctggtaccctgcgggaagctacgggttttactgcgctgctgatagccatcctttttacccaatgaccagttagtcgcttccacggagagtaccgggatcccggcgctatcaaaaacgctggcatcgttacagcagccggtgcctttcgggaactccggattcagccctggattggtgaacgcggcgataccgtgactacgggcgatagccagcgcgcgatcgcgggtcagcttgcgtaccgatgccggcgtgctgcgcccgctattgaaatagagcttatcgccgaccaccaggttatcgagattaatcaccagtagcgtatttttcttttccgcctcgctcatgcgtttaagtatgttttgcgcgcccaggcggccttcttcctcgccgctggtggcgataaagcgaatgccgtaacgggtggggacgttctttaaatgttccgccagctccagcagcacgccgagccccattgcgttatcgtcaataccctgcagcgtcaggccgccaaggttgttctcaacgtctttatcgctctgcggcgcgtaggtatcgaggtgcgccataataatgatttgctggcgagactggccttcatgcgcggcgataaccgtgctgccggtggcgttgtgccagttcttacgttgattgctgtcggtatagatgtagcgggtattaaagctacgtacgtcgctctgataacccatctgggcaaactgttgacgaagataatcggctgatagcatctcggccggcgtaccggtcattcttccggggaagacggtagcaatatggcgggcctgggtattggcggtgtcgcccagggcgctgaatgccggagcggcggagaagacaaaacctgtgccaagcgccagcggcagcagacggcggcacatcgcggaaaacataatgggtccttacacaagcgaaacatttcgaccgcgttagtatgaaactgtgacggcgcttaaacaatttcatttgctcttaaatagcggaaaatgagcgtgttaagcactttttgatatttagatttccagctcgttattcttttgcgtcacaactcattccatttcgtaatttcatttgctcaaggccgccccctatagtccctctattgctgaatgtaagagagttgttgcgccgtggattacttgcccctgtttgccgagttgaaagagagacctgtgctggttatcggcggcggtgaaattgccgtccgtaagattaaattcttgctgcgggcgcaggcgaaggtacaggtggtcgccgccgtcctgtcgccggagctcgctgaacaggttgaacgtcagcaaatcagctggcgggcaaccgcctttgatgagcagcaggtggacgatgtatttctggtgattgccgccaccgacgatcgtgaacttaaccagcgggtgtttgccgcggctaacgcgcgttaccgcctggtaaatgtggtggatgaccagcaactgtgctcattcgtctttccttctattgtcgacaggtcgccgctgctggtggcgatctcctccagcggcaaggcgccggtgctgtcgcgcattctgcgtgaaaaaatcgaagcgctactgcccacaaatttgggacgactggctgaaacggcgagctactggcgccatcatctgaaaacccggctgaccaccaccgaagcgcgtcgtcgcttctgggagcgcgttttcaccgggcgttttgccagcctgatggtggccggtaaccacgcggcggcggaacgggcgctgcaggatgaactcgacaagccggaacgcagcgtgggcgaaattattctggtaggcgccgggccgggggatgccggcttgctgacgctacgcggcctgcaggcgattcaacaggcggacgtggtgttttatgaccatctggtgaccgagagcgtgcgggaactggtgcgccgcgatgccgaaatgatctgcgttggcaagcgcgcgggcgagcactccgtaccgcagcacgaaacgaatcaaatgctggtggaggctgccaaagcggggaaaacggtggtgcgcctgaagggcggcgatccgtttattttcggacgcggcggggaagaactgcaggcggccgccgccgccgggatcccgttccaggtggtgccaggcgttaccgccgcggcgggcgcgacggcctatgccggcattccgctgacccatcgtgattatgcgcaaagcgcagttttcgtcaccggtcactataaatctgacagcgcgccgtttgattgggcgctgctggcgaagagccaacaaacgctggcgatttacatgggcaccatgaaagcggcggacatcagcgctcagctgatcgcccatggccgcgacgcgaatactccggtggcggtgatttcccggggcactcgcgaggatcagcagacgctgacaggcacgttacaacagctcgaacatctggcgaaagatgccccaatgcccgcgctactggtggtgggcgaagtggtacagctgcatcagcagctcgcctggtttcaacacacaacgacagcggaagggtttaactcttctgtggtaaatctggcttaaggaacggttatggaccaaaaacgactcactcacctgcggcaactggaggcggaaagcatccatatcattcgtgaggtggccgccgaattctctaacccggtgatgatgtactccatcggtaaagattccagcgtaatgctgcatctggcgcgcaaagcgttttatccggggaccctgccgttcccgctgctgcacgtcgataccggctggaaattccgtgagatgtatgaattccgtgaccgtaccgccaaagcctatggctgcgaactgctggtgcataaaaacccagaaggggtggcgatgggcatcaacccgttcgttcacggcagcgccaagcacaccgatatcatgaaaaccgaaggcctgaagcaggcgctgaacaaatacggctttgatgccgcattcggcggcgcgcgtcgtgatgaagaaaaatcccgcgctaaagagcgcatttactccttccgcgatcgtttccaccgctgggacccgaaaaatcagcgtccggagctgtggcataactacaacggccagattaacaaaggcgaaagcattcgcgtcttcccgctctctaactggaccgagctggatatctggcagtacatctatctggaaaatattgaaatcgttccgctgtacctggcggcagagcgcccggtactggagcgtgacggcatgctgatgatgattgatgacgaccgtatcgatctgcagccgggcgagatgatcaaaaagcagatggtgcgcttccgtaccctcggctgctggccactgaccggcgcggtagagtccaacgcgcaaacgctgccggaaattattgaagagatgctggtatccaccaccagcgaacgtcaggggcgcgtcattgaccgcgatcaggcaggctccatggagctgaaaaaacgtcaggggtatttctaaggagccgccatgaacactacgattgcacaacaaattgctaaagaaggtggcgtagaagcttatctgcacgcgcaacagcacaaaagcctgctgcgttttctgacctgcggcagcgtcgatgacggcaaaagtaccttgattggccgcctgctgcacgatacgcgccagatttatgaagatcagctctcttccctgcacaatgacagcaagcgtcacggtactcagggcgagaaactggatctggcgctgctggtggatggcctgcaggccgagcgcgagcagggcatcaccattgatgtcgcctatcgctacttctcgactgagaaacgcaaatttatcattgccgacacgccgggccatgagcagtacacccgtaatatggcgaccggcgcgtccacctgcgatctggcgatcctgctgattgacgcccgcaaaggcgtgctcgaccagactcgccgccacagctttatctctacgctattggggattaagcacctggtggtcgcggtgaacaaaatggatctcgtcgagttcagcgaagcgcgcttcaatgaaattcgtgaagattatctgaccttcgccgaacagctgccgggcaagcttgatatccgtttcgtgccgctctcggcgctggaaggggataacgtcgccacccagagcgataaaatgccgtggtacagcggcccgacgctgctggaagtgctggaaaccgttgacatccagcgcgaggttgaaagccagccgctgcgcttcccggtgcagtacgtgaaccgtccgaacctggatttccgcggtttctccggcaccgtcgcttccggtacggtcaccgttggccagcgcctgaaggtattgccgtcgggcgtggagtcgaacgtggcgcgtattgtcacctttgacggcgacctgccgcaggccggggcgggggaagcgatcactatcgttctgaaagatgaaatcgacatcagccgcggcgatttgctggttgacgctgaagcctcgctgcctgcggtacaaagcgccagcatcgacgtcgtgtggatggcggaacaggcgctgtcgccgggccagagctatgacattaaagtggctggcaagaaaacccgcgcccgcgttgacgctatccgctatcaggtggacatcaacaatctgacccagcgggaagtcgaaaccctgccgctgaacggcattgggctggtggagctgacctttgacgagccgctggtgcttgatccatatcagaacaacccggtgaccggcgggcttatctttatcgatcgcctgagcaacgtgacggttggcgcgggaatggtcaacgaaccgcacctgcaggtgcaggccccgacgtcgcagtacagcgcgtttgaactggaactgaatcagctgattcggaaacacttcccgcactgggacgcgcgcgatctgctgggaggcaagtaatggcccggcatgacgaaaacgtcgtctggcatgcgcatccggtgacccgagagcagcgcgagcagcaccatggccatcgcggcgtggtgctgtggtttaccggcctctcggggtcgggtaaatccaccgtcgccggggcgctggaagaggcgctgcacgagcttggcgtaagcacctatttgcttgacggcgataatgtgcgtcacgggctgtgcagcgatctgggattcagtgacgacgatcgcaaagagaacattcgccgcgtcggtgaagtggctaagctgatggtcgatgccgggctggttgtattgacggcgtttatatctccgcatcgagcggaacggcagatggtacgtgagcgtttgggggaaggacgctttatcgaggtctttgtcgataccccgttagccatctgtgagacgcgggatccaaaaggattgtacaagaaggcgcgggcaggggagttgcgcaattttaccggtattgattcggtctatgaatccccggagaatgctgaaattcatctggatggtgaacaattggtaacaaatttggtgcaccaactattagacctgcttcgacagagcgatattatcagatcctgaaaaggcaacggcatcgaggggtgccggtcggccggtcaacaggattcgatatgcgcaatacccagaacctcagtattattcgttcagaaccgcctccggcggccagcgacgagaccacctggtctttgtcgggcgccgccgtgggctttatttcgtggctgctggcgctgggtattcccttcctcttgtatggcggtaatacgctctttttcttcctctacacctggcctttcttccttgccattatgccggtcgccgtggtggtcggtattgcgctacattcattactggacggcaagctgatttacagcgtttgcgcgacgattttaaccgtcgggctgatgtttggtctgctgttcctctggctgttgggatagcctttttgggatgaatcaagcctgggtatccatcgcaaaaatgtggtacagtccccgcgttacgcggcatcgtccgcgcgccagggtagagtactccggcgagttatgggatgatgatgccgtttttcagggggcaggatgggtaaattaacgctgctattattagctttgctggtctggctacagtactcgctgtggtttggcaaaaatggtttgcacgactatagccgggttaatgacgatgtctccgctcagcaggccactaacgccaaattaaaagcgcgcaacgatcagcttttcgccgaaattgacgatctcaacggcggtcaggaagcgatcgaagaacgcgcacgcaatgaactcagcatgacccgcccgggcgaaacgttctatcgtctggtgccggatgcatcaaaacgcaatcagggttctgcgcagaataatcgataaacaagcccaggatgacaatatggcagccacttttccgggcgtttgcgccgtggtgccggcagccggttttggccgccgtatgcaaacggagtgcccgaaacaatatctctcaatcggtaacaaaacgattctcgaacattcggtcgccgcgctgctggcgaacgaacgcgttcagcgggtggtgatcgccgtcagccccggcgacctccgctttagtcaacttcccttagcccatcatccgcaggtcaccgtcgttgacggcggcgccgagcgcgccgattcggtactggcggggctaaaagcgttagcggatgcgcaatgggtgctggttcatgatgccgcgcgaccgtgcctgcatcaggacgatctctcgcggctgctggcgctgagcgcaaccagccgcgtcggcggcatactggcggcgccggtgcgcgataccatgaagcgtgccgaaccgggcaaaaccgcgatcgcccataccgttgaacgcaatgatttatggcatgcgctgacgccgcaatttttcccgcgtgaactgctatttgactgcctgacgcgcgcgctggatgaaggcgcgaccatcaccgatgaagcgtcggcgctggagtactgcggcttccatcccgaattggtcgccggacgagctgataatattaaagtaacgcgcccggaagatctggcgctggccgaattttaccttacccgttcccgacaccaggagaaggcttaatgcgaattggacacggttttgacgtacacgcttttggcggtgaagggccaattattattggcggggtacgtattccttatgagaaagggctgctcgcccattccgatggcgacgtcgcgctacacgcgttgaccgacgcgctattgggcgctgcggcgctcggcgacatcggtaaactgttcccggataccgatccggcctttaaaggcgcggatagccgcgagctgctgcgtgaagcgtggcggcggattcaggctaagggatatatccttggcaacgttgacgtcaccatcatcgcccaggcgccaaaaatgctgccgcatatcccgcagatgcgcgtgtttatcgccgaagatctcggctgccatatggacgacgtcaatgtgaaagcgaccaccaccgagaagcttggcttcaccggccgtggcgaaggcatcgcctgtgaagcggtggcgctgctgcgtaaggctgcgcaatgatcgcctttgatgacttaacatacctgcacggcaagccgctgggccaggggcggctgaaggccaatccggaagactttctggtggtcgaagacctcggtttcgcccctgatggcgaaggcgaacatgtgctggtgcggattctgaaaaatggctgcaacacccgttttgttgccgatgcgctggcgaaattccttaaaatccatgcgcgcgaagtgagctttgccgggcaaaaggataagcacgcggtcaccgaacagtggctgtgcgcccgcgtgccgggcaaagagatgccggatctgagcaagtttcagctcgaaggctgccaggtgctggagtatgcccgccataagcgtaagctgcgtttaggcgcgctgaagggcaaccagttcacgctgatcctgcgggaaatcagcgaacgcgacgatgtcgaaaagcgcttgcaggcgattgccgactgcggcgtgccgaactatttcggctcgcaacgctttggtatcggcggcagtaacctgcagggcgctttgcgctgggccgagagcggcgaaccggtgcgcgatcgcaataaacgcagtttttggttgtcggcggctcgcagcgcgttgtttaatcagcaagttgcaattagattaaaaaaaacggaatttaatcaggttgttgatggcgatgcgctacaattagcggggcgcggaagctggtttgtggcaaccaccgaagagttggcggaattgcagacgcgggtcgataaccgcgaactgatgattaccgctgcgctgccgggcagcggcgactggggcagccaacgcgacgcgctggccgccgagcaagccgcgatagccgaagaaacgtcgctacaggcgctgctggcgcgcgagaaagttgaagccgcgcgccgggcgatgctgctgtatccgcagcaattgtgctggaactggtgggatgatgtcactgttgaactgcgcttctggctgccagcgggaagttttgccaccagcgtggtaagggaacttatcaatacaacgggtgactatgcgaatattgctgagtaacgatgacggtatccacgcgccggggatccaaaccctggcgaaggccttacgcgaatttgccgaggtccaggtcgttgcacccgatcgtaatcgcagcggcgcctcaaattcgctcacgctggaatcttctctgcgcacgttcacctttgaaaatggcgatatcgccgtccagatgggcacgccgaccgactgcgtctatctcggcgttaacgcgctgatgcgcccgcgcccggatattgtggtctctggaatcaacgcgggccccaatcttggcgatgatgttatctattccggtaccgtcgcggccgcgatggaaggccgccatcttggttttcccgcccttgccgtttcgctgaacggctatcaacattacgataccgcggcggcagtgacgtgcaccattctgcgcgcgttaagccgcgagccgctgcgtaccgggcggatcctcaacatcaacgtgccggatcttcccctcgagcaaatcaaaggcattcgcgtcacccgctgcggtaaccggcatccggccgaccaggtcatcccgcaaaaagatccgcgcggcaatacgctgtactggatcggcccgccgggagataagcgcgatgccgggccggggaccgattttgcggcggtggatgaaggctatgtttccgtaacgccattgcatgtcgatttaaccgctcatcaggcacatgaggtggtaaccgattggttagaacgcgtcggggttgatacgcaatggtaagtaaacgtgttgaaagtttgttgaatcagctacgcactcagggcatcgtcgatgagcgggtcctcgaggcaatcgcgcaggttccgcgcgaaaaattcgttgatgaagcctttgaacataaggcgtgggaaaacaccgcgctgccgattggccaggggcaaaccatctcgcagccttatatggtggcgcggatgacggagcttctggaactgacgccggactcaagggtgctggaaatcggcaccggctccggctatcagacggcgatcctggcgcacctcgtgcaccacgtctgctcggttgagcggattaagagcctgcagtggcaggcgcgtcggcgtcttaaacaacttgatttacataatgtttcaacccgtcatggcgatggatggcagggttggcaggctcgcgcgccttttgacgcgattatcgtcaccgccgcgccgccggaaattccggccgcgctgatggcgcagctagatgaaggcggcgtgctggttttgcctgtcggtgaagaacatcagtacctgaagcggatccgtcgccgcggcggcgaatttttcatcgataccgtcgaagccgttcgctttgttccgctcgtcagaggggaactggcctgaacccggattattccaggttttttttgcctaagtttaggcgtagggtggacacatttttcagtgtcctggccgggcgctgcccggtaagcaagatattggcagttaacatattcctgggggataaatgagcgcgggaagcccaaaatttaccgtaagccgtattgcggcgttgtcactggtttcactctggctggccgggtgtacaaataccaataatccgcctgcgccggtgaattcggcaagcggcgctgcgtcctccagcaccaattccgggatgctgattacaccgccatcctccggctcgcagcaagttccgccggctcagccgattcagccgatgcagacccagccaattcagactcagccgacccaggttcagccgatggctcagcagccggtacagacggtgaacggtaagatcgtttacaaccgtaaatatggcgatattccgaaaggcagctacaccggcggcagcacctataccgttaagcgcggcgataccctgttctatatcgcatgggtcaccggcaacgatttccgcgatcttgcggaacgcaacaacgtcccggcgccgtacgcgctgaacgtgggccaggtgctgcaggttggcaactccgcaggccagccgatcaccggcgaaaacccggtatctcaggctagcgcgcaagcaagcggcggtgcgacggccaccacaacttctgcacaaaaatccaccgcagtggttgcgtcacaaccgactattacgtattctgaatcttcaggtgaacagagtgctactaagatgttgccgaataataaaccagcaacgaccacgacagcggtcgctccggttacggcgccatcaaccgttagcacaacccaaccgactgcaagcagtacgtctaccagttcgccgatctcatcatggcgctggccgactgatggcaaggttatcgagaactttagcggcgcggaaggcggcaataaaggtatcgacattgcaggcagtaaaggacaggctattgtcgcgaccgccgatgggcgcgtcgtctatgccggtaacgcactgcgcggttacggtaatcttattatcatcaaacacaacgatgattacctgagtgcctacgctcataacgataccatgctggttcgggagcaacaggaagtcaaagcggggcagaaaatcgctaccatgggtagcaccggaaccagctcaacaagattacattttgaaattcgttacaaggggaaatccgtcaacccgctgcagtacttaccgcagcgataatttggcaaagtacggataagcgtaacaccatgaaaggcgccagggcggtcgcgatatgcctccttcagtggaggcataaagaggataactccggcgtcgtttagtgatgggtcgcggaaggtgctttgctcagggatcacgggtaggagccacctttatgagtcagaatacgctgaaagttcatgatttaaatgaagacgcggaatttgatgagaacggaatggaggttttcgacgagaaagccttagtagaagaggaacccagtgatagcgatctggctgaggaagagctgctgtcgcaaggcgccacccagcgcgttctcgatgcgacacagctgtatcttggtgagattggttattccccgctgctgacggccgaagaagaagtctatttcgcccgtcgcgcactacgtggagatgttgcttcacgccgtcgcatgattgaaagtaacctgcgtctggtggtgaagatcgctcgtcgttacagcaatcgtggtctggcgctgctggatctgattgaagaaggtaacctcggcctgatccgcgcagttgagaagtttgacccggaacgtgggttccgtttttcaacctacgctacctggtggatccgtcaaacgattgaacgggcgattatgaaccaaacccgtactattcgtttgcctatccatattgtgaaagagctgaacgtttatctgcgtaccgcgcgcgagttgtcgcataagctggaccacgagccaagcgctgaagagatagccgaacagctggataaaccggttgatgacgttagtcgtatgctgcgtctgaacgagcgcattacctcagtggataccccgctgggcggtgactcagaaaaagcgctgctggatattctggccgatgaaaaagacaacggcccggaagacaccacgcaggacgatgatatgaaacaaagcatcgtcaaatggttgttcgaactgaacgccaaacagcgcgaagtactggctcgtcgttttgggctgctgggttatgaatccgcaacgcttgaagatgtgggtcgtgaaatcggcctgacccgcgaacgcgtgcgtcagattcaggttgaaggcctgcgccgcctgcgggagatcctgcagggacaggggctaaacatcgaagcgctattccgcgaataaatcgttttctctcaaaaaggcccaatcctgcgattgggccttttcctttgtattaaccgatgcgggtttcctgcaggtgacgccagaagattttcccctcaatgcgctgaaatatcgccgtcgaccagcgtacgatctcgccttgttccggcagggtctggctttcgcggtagagcaccgcgccgccgtcatgccattcgctcaacacctgcgcattatcaaccacgatacttaatcccgggcggctgccgccagcgctatggaaaaagccgcttaccgtcgggtaatccatcttagcgccgctgataggaaccattgtaaactcttgtgcaaaacggctcatcagcgcttgtgcgctaccttctttccggcccagccattgttcaatgatcacgtgggcgtcgataacttcttggatccatgggttcatgttttctccggattaagctgcaggcaatgcaggggattactgtaaaccgcgtctcaggggcggataaatgcgcttttcagggatatactgtctaataatttttgacaataagccctattcaaatgctaaacctgcagcgcgttaccatgtttgtcgccgttgttgatgccggaagctttactgccgcggcggcggcgcttgggcaaaccaaagcggtggtcagttttaacgttcgccagctagagagtgaactgggggtgacgttgctgctgcgttcgacgcgccggttaacgctcaccgaagccggggcggtgttttatcagcgtggcgtcgggctgttgaaagccgcggagaatttacaggatgaggtgcgcgccagccacgccgggttaagcggtgaactgcggatcaccaccaccccggaatatggcgctcaggtgattatcccggcactggcggaatttgctcgtcgacatccggcgctgcgggtgcgtcacgtctcatcgtcttatcacgcggatttgatctctgaacggtttgatgtcgcgatacgcctcggtaccctggccgattcgcgctatcatgcggcccggatttcgcgtttcgccatcgtgcccgtggcctcgccgatttggctggataaacatccgctgcgcacgcttgccgacctggcgcaggcggagtggatagttaacgagcgcttagcgacgccgctgcgctggcagctcctgaccgccgaaggacaatcgttcgcttttgaaattacgcaaccaccgcggatctcagccgatagcgcacaagcgttaatgggcttcgcgctggcgggaagcggagtggcgctactcccggagtggctggtggccgaagctatcgtgcggcaggagctggtgcgggtagtgccggagtatatttttccatcgcagggggtatacgctgtctacccggacgcgcagcatgtgccaaccaaggtccgggcatttatcgattttctgcgcgaacgaactgcttaatccgcgtttttattttccatcattttcagcaccagccgggaaaactgcgcgcgctcctcttcgttaaggcggctcaaaaattcttcatcgacccgattgccttgcggcatggaatttgccagcagcgcctgcccttcattcgtcagatagacaaagcggcgacgtttatcgctcggatcgtgttcgcggcgtaccagcccgcgtttctccatccggctaagcatctccgccagcgtcgcttttgtgctgacggccgcttcgataagcgccacctgctcgataccaggatgttcggcgaccgagcgcatcaccgcgtattgcggcttggtcagttccggtaattcatgctgccagcgcgcggtatgctgttgaaaaagctggcgtagaaggtggaacgcctcgttacgtaactccatggacactccgtcacaaaaatatcacctttatgatagccgtattttcggcttcttttcacatctcatttttttgattattgatgcgatcgtgtacgaacgatattgagatcccctaagaatgagcgtagttttaatataaaggttcgtatacgaacaatgtatgaggtagcgaatgaaactgattattgggatgaccggggcgaccggcgcgccgttaggcgtcgcgctgttacaggcgctgaatgaaatgccggatgtggaaacgcatctggtcatgtcgaaatgggcaaaaaccaccattgagctggaaacgccctatagcgctcgtgaagtcgccgcgctggcggatttctgccatagccctgcggatcaggccgcgaccatctcatcaggatcgtttcgtaccgacggcatgattgttatcccctgcagcatgaaaacgctggcgggtattcgcgctggctatgcggaagggttagtcggccgcgcggcggacgtggtgctgaaagaggggcgcaagctggttctggtgccgcgtgaaatgcccctgagcaccattcatctggagaacatgctggcgctgtcgcgcatgggcgtggcgatggtgccgcccatgcctgcctattacaaccacccggaaacggtagaggatatcaccaaccatatcgtgacccgggtgctggatcagtttggtctcgaataccacaaagcgcgtcgctggaacggcttacgcgcggtcgggaatttatcacaggagaattagtcatggcttttgatgatttacgcagctttttgcaggcgctggatgagcaggggcaactgctaaaaattagcgaagaggtgaatgccgagccggacctcgccgctgccgctaacgccactgggcgcatcggcgacggcgcgccggcgctatggttcgataacattcgcggctttaccgacgcccgtgtcgccatgaacaccatcggttcctggcaaaaccacgcgatttcgctggggctgccgccaaacacgccggtgaaaaagcagattgatgaatttattcgccgctgggataaattcccggtaacgccggagcgtcgcgccaatccggcgtgggcggaaaacaccgttgatggcgacgatatcaacctgttcgatattctgccgctgttccgcctgaacgatggcgacggtggtttctatctcgacaaagcctgtgtggtttcgcgcgatccgcttgacccggaccacttcggcaagcagaacgtcggtatttaccggatggaagtgaaaggcaagcgcaagctgggcctgcagccggtaccgatgcacgatatcgcgctgcatctgcataaagcggaagagcgcggtgaggatctgcccattgccatcaccctgggtaacgacccgattattaccctgatgggcgccacgccgctgaaatatgaccagtcagaatatgagatggcgggcgcgctgcgcgaaagcccgtatcctatcgccaccgcgccgctgaccggctttgacgtaccctggggctcagaggtgatccttgaaggggtgattgaagggcgcaagcgtgaaatcgaagggccgttcggcgagttcaccggccactactcaggcggccgcaatatgacggtggtgcgtatcgataaagtctcttatcgcacaaaaccgatttttgaatcgttgtatctcggaatgccgtggaccgaaatcgactatctgatgggcccggcgacctgcgtgccgctgtaccagcagctgaaggcggagttcccggaggtgcaggcggtcaacgccatgtacacccatggcctgctggcgattatctccaccaaaaaacgctacggcggttttgcccgcgcggtgggattacgggcgatgactaccccgcacggcctcggttacgtgaaaatggtgattatggtcgatgaagatgtcgatccgttcaacctgccgcaggtgatgtgggcgctctcctcgaaggtcaacccggcgggcgacctggtacagttgccgaacatgtcggtgctggagctcgaccctggttccagtccggcggggatcaccgacaaactgattatcgacgccaccaccccggttgcgcctgaccttcgcggtcactacagccagccggttcaggatttaccggaaaccaaagcctgggctgaaaaactgaccgccatgttggccaaccgtaaataaggagaagaagatgatttgtccacgttgcgctgatgagcagattgaagtgatggcgacgtcgccggtaaaaggggtgtggatcgtttaccagtgtcagcactgcctctatacctggcgtaatactgaaccgctgcgtcgtaccagccgcgaacattatccggaagcgttccgcatgacgcagaaagatattgatgaggcgccgcaggtgccgcatattccaccgctgttggcggcagataagcgttaaatgactggcccggatattccgggcctttttatttagaattaaagggcgtgacaagtattttcaattagattataactagtgacttaatcattaatgattataattcacatcttgtcagctatcattactcatttttgcttctctctgtttattttttaaacagtcaaccctccataagtttttaattaaatgcatccaatttgaatcaatctgtaaatatcttgtagtctaaatatggactcgatggggtattttaaaatacatattgacgtccattttttctaaacgagttaataaacattatcactgaacgtgcattatttaatgggcgtttgttgataatgcttttcggttgtcattttgacaacaattaataattgcgatgtttattatttttattgggatattaaagaatgaaacttactaaaatcggcgcagctctggttctgacttttggcatgagcgcggcagcgatggcatctaacaccattacctttaacggtgaagtgctggagacgggttgcaccatcactgttgatggcggtactccggatgcaaccgttgaactgggcagcgtggcagcaactgatttggtagcaaaaggtgacctcggcgcgccgaaacagttcgtttttaatctggaccagtgcccgactgcgtccaatgtcaatattgtcttctctgcgccggttgatccggtggctggtgatgactcgtacttcgcgaataccgcctctggggttggcgtcactgctgcacaaaacgttgccgttcaactgaagcaaggcggttctaatggcaccatcgtgaagaacaatgcagacaacgatcctattaccctgaactctggctctgctaccgagacctacaccgcatcgatgattgctgttgatcaggctgttgctggtacggttcagtccgtcgtgacctataacgtccgttataactaatcctgaaggaggggaaaccctccttatatttctgtgagtgcattgcataatgaaacccatcgcagcttttgttttttgtgtggccgccgttgccagtctgaatgcgtctgccagtatcgttaccggcggaacgcgggtgatttttgacggctcccatcaggccgcctcgttatccgtggaaaactcggacaaagttaccaatctggtgcaatcctgggtcagtcccgccgaaggtagcgcgctgaaaaaagaaactatgattattacgccgccgctgtttcgcctcgaagccgggaaaaaagcgtcaatccggattgttcgttcagggatgccggttccggaagatcgcgaatcattattgtggctaaacgtaaaaggtattcccgctacggatgatagttctgctggcaaaaataccatgcagattgccatcaattcgaaaattaagctgatctatcgcccggttgcactcaaaggccagtcgccggaaagcagtgcaaataaagtggtatggaagccggttgccggcggtgtgcaggtcaataacccgacgccgttttatatgaacttctcccgtatagaaattaataatcatgtgctcagcggccaatattttgtcgcaccgttctccacgctgaatatttccgaagggaagatcccctcccacggcaaagtgacctggtcgctgattaatgattacggcgtgaaaggtcaggacaaagtctcttcatattaatcggcacggtacgtatcccgtacggatacagggtaataatggaaaaagttaagcatacctatgtcctttctttagggctggggctcagtattgccttcagttctttcagcgccattgctcaggaacattttaaccctcgtcttttggaaacggatagtacagagacgccaatgatggatctcagtctgtttgccaaagatgaggtaccgcctggtgactataacgtcgatatttatatcaacggtagcctggtggatactaaaaccatttcctttcgcaagctgtcggacgacaaaaacaccaccgccgggcaggttgttggagcgtgcctgagcgtgtctgagctgaaagcctggaatgtgcgggtcgataactactttagcgaacaggacaaaaccagcgagtgcgccagcctgcaggctattccgggtctggaacagaaaatggatctggcgaatcagcgctttgatctcactatcccgcaggttgccctgctcaacaccgcccgtggttacgtttcgccagagcgatgggatgaaggtattgccgccggtttgcttaactacagcgtctctggtcagcaggatttgcaccaccgtaatggcgtggacagtagcaaccagttcgtcagcctacagccgggactgaacctgggggcgtggcgtttgcgtaactattccacctacagccactctgaatccgaaagtgagtgggattcggtgtacacctacgcttcccgcgatattaaatccctgaaaagccaactggttctcgggcagggcaccacccgcggcggcgtgtttgatagcgtgggttttaccggggtacagatgtattccgataatgatatgaagccggacagcatgcagggcttcgcgccggtgatccgcggtatcgcccgcagcaacgccgaggtcacggtgtaccagaacggacacagcatctataaggccacggtgccgccggggccattcgaattcagcgatatgtacccgaccggtagctccggcgacctgaaagtggtgatcaaggagtctgatggttcgcaaagtagcttcatcgtcccttacgccacattgccggtgctacagcgtgaaggacaggtgcagtatggcctggtggcgggtaaaacccgccaggacggatcggattcgcgggcggaagactttaactttgtccagggatcggcggcctggggcgtcggcaaaggcgtgaccttgtacggcggctatattcaggcggaagacaaatactccaacctgattgccggtaccggttttaacctcggcagcgccggggcgctctcttttgatatttcacagtcgtgggcggatgtcccgcagccggacaatatacggcagatggaacaccatagcggccagtcgtaccgcgtgcgctacagcaagacgctgcagcagaccaacaccgatattgcggtggctggctacaaattctcaacccgcggttatctgtcgttccaggatttcctcaatgattgggatccgggcaacagcgccatcgataacggtcgcgaacgtaatcgtttcgacgtgactatctcacagacgctgcctttcggtacgttgtccctgaccatgtatgacgcctcctactggaatagccagcacgccgactcgctgaacctcggcttcagcagcacgctggggccggtatcgtactcgctgaactatgcgcatacgaagaacgttgatggcggttatggcaacgattccgatgaatacgatgacgataacgtcttctcgcttaactttagcgtaccgttcagcgccttcagcaatagtgaagcggcgcagtcgatttcggctaactactcgatgaacagcagcaaacacggcgataccacgcataacatcggtatttccggcaccgcaatgcaacaaaatcagctcaactggcaggtgtcggaaggctataacgccgattcagaagcgaccaacggcaacgttaccgtcggctaccagagctcgtatgccgatgtgtccgccggttacagctacgacgactacagccgtcgtctgaactatagcctgcgcggtggaatggtggttcacagtggcggtattaccctggcccgtcagttgaatgacagcgtagcgctggtggaaacgccgggcgtctccggggtgccgatcaatggccagactaacgtccataccgactactttggtaatgcgattgtgccgtacgtgcgtccgtaccacagtaatcagatttccctcaataccgtggaggccagcgatgccaccgcggccattgataacgtcgccaaaaccgtggtgccgaccaaaggcgcggtggtccgcgtgaagtacaacacctggattggccggaaggcgatgatgacgttgatcttcaacggtaagccggtgccgttcggcgcggtagtcacgcaaaccagcgatgattcggacgacacccgcagcagcatcgtcggcgacagtggtgaagtgtacctggttggtctcgccgataaagggcaactgatggtcaagtggggcgacggggcgaacaaacagtgtgccgttgactacacactggcgggcgcgaagtcgcaggccgatattctgtttatcaacgggatatgccatcccgtccagggggctcactgatgtcacgctttcattttgctaccgtccgacgcatggcggcgacgagcctgcttttcgttgccgggctgccgtctgcgctggcgtacaacacacaggatgtcattaacttcagcgtcacggggaatattgtggcaggcagctgtaatgttagttatcccgcgaccgttgaactgggaacctatctgccaacggattttattaatgaaggcgatagcacggacaatgtcccgttcactgtctctttcactaactgttctccctcgctgactaaagcgacggtagcgtttaccggtgccgtagatggaacccagccattctattttgccaacgggattacggcagaggggggcggcgcaaccgatgttgcactggaattattaaccgatgcggatcactggcaaatgtctaacgggcagagtcatgacgtcactctgcagtcagacagccatgccggtgaaatcatttttatcgcaagaatggcaaccccaggccacaaccccggtaccggggagttccagagcgtcgtcaccctgaacgttgtttataactagttacctgataaaaggcaggagacatgtcaaaatttttatatgctgttctgtttttcgcggggatgctggttagcgcaatgtcagctctggctggggataataatctccgggagacacgtgatattacctttcacggcaggattgccgcagggacctgtaatgtcaccaatcctgaaaccgtagatctggggaaatactataaaggagacttttctgttgccggcggtaacaccggcaacgttccagtcaccatcagttttgacagctgtactgctgaaatcagccaggccaccgtcaccttcaccggcacgccctattccgaagaccctacctatggctcggtcatttatgccaatcaggtgacgcctgatgcagatggcgctaccgatgttggattgcagttgttcgattatcccgctatccacgtggcgctggccaatggggtgagttatccggtacccattgaaaatggcgcgggcgcattgaaatttattgcccgcatgtacacccctcatggcgccccaacggcgggtaaattcagctccgcggtcacgttgaacgtgacctataactaaccccgatttaaggcaaacaacgtgttaaaatttttatatgccaccctgttattgctggggctgtttccgctggcggcccaggcggtttgtcatcgtaccgacgacaccccgtcgcaatcttatgttgcgatgccgcagcagctactggtctccagtaaaaattatgcgccgggcgagatcctgtatgactccggatatatgtccggcggcacgacaaccatcaagaactgtgcggggacctattacgtcggctttcactacgccggcgcgttaaccaccgccagcccgctgcaggataatgtctatccgttgaccaatggttcaaccgccaccgggctcggtattcgcgtctataccattaatcaggcgggcccgtttgatgacgaacgggcgatcgataacagctggcaggaacacgatgccggggcaggctccgaccacaccctcaataactccgcttatcgggtgcagattatcgccaccggcgggccgataaccagcggcacgtttaacgtaccgagcccgctggcgcgggtcgattatcgcgaaacacagagtattgatagcagcgatggcgacatcgcctccacgctgacgctgtcgaccaccacggttgaagtacatgcgatgggctgtacggcggatgtggcgagtctcaacttcccaatgggggatgtcgaagtgtcggcgtttgacagtaccggctacgtctattccgggccagaaaaaaacgtcaatctgacctgcgagccggggaccaatgtctcgatgactatgaacgcggcgacggtgtccggcgataactcaactattgcgctatccgacaatggcgacgggagtacggcaacgggggtgggggttcagctggaaagaaaacttcccaatggcggattctatgtgttgatgagcgcaggccagacggtaccgatcttttactcaaagcgcagtgacacttcaacctggtctgcggggactgacgccgatggcactacgcccttttccggagataccggcacgggcagtacctatactgatgcgaccaatcctggcggcgcttccgccaatgaaactctgaccttccgggcgaactaccataaaataggggaaaccattacccccggtaccgccaatgccaccgggacgatcaccctgcaatataactgatgctaaaaacaaaaagcctgacgatgacgccaggctttttgttatttaacgcttaattacgccaggcttttcaggcggtagatccactccagcgcctgacgcgggctcagcgaatccgggtcaagattctccagcgcttccagcgccggcgaggtctcttccggcgcggagagcagcgacatctgcgtaccatcaacctgcgtggcggcggcatttggcgaaatgctctccagctcgcgcagtttctgccgcgcgcgcttgatcacctctttcggcacccccgccagcgcggcgaccgccaggccatagctcttgctggccgcgccgtcctgcacgctgtgcataaaggcgatggtatcgccatgctccagtgcatcgaggtgcacgttggccacgccttccattttttccggcaactgggtgagctcgaagtagtgggtggcgaacagggtcaacgccttgatcttattcgccagattctccgcgcaggcccacgccagcgacagaccgtcgtaggtagacgtgccgcgaccaatctcgtccattagcaccaggctgtgttcggtggcgttgtgcagaatattggcggtttcggtcatctccaccatgaaggtggaacggccgctcgccaggtcatctgccgcgccgacgcgggtaaagatgcggtcgatcgggccaatttctactttctgcgccggcacgtagctgccgatataggccagcagcgcaatcagcgcggtctggcgcatataggtacttttaccgcccatgttcgggccggtgatgatcagcatgcggcgctgcggcgccagctgcagcgggttggcgataaacggctctttcagtacctgttccactaccgggtgacggccttcggtaatgcgaataccgggtttatcgataaaggtcgggcagcagtagttcagggtctcagcgcgttccgcgaggttcaccagtacgtccagctcggccagcgcgctggcgctggtttgtaagtcggccagatgcggcagcagcttttcgaacaggtcgtcatagagctgtttttccagcgccagcgccttgccttttgaagtcaggaccttatcttcgtattccttcagttccggaataatgtagcgctcggcgtttttcagcgtctggcggcgcacgtagtggatcggcgcgtgctggctctggccgcggctgatctggatgtagtaaccgtgaacggcattgtagccgaccttcagggtatcaaggcccagccgctcgcgttcgcggatttccagtttgtcgagataatcggtcgcgccatcggccagcgcccgccactcatccagctcttcattataacccggagcgataacgccgccgtcacgtaccagcaccggcggcgcgtcgatgatcgcgcgttccagcagttcacgcagttcggcgaactcgcccattttctcgcgcagctgttgcaccggctgacagtcaacgtcggccagcagctcgcgcagcagcggcagctgctggaaggcatggcgcatacgggctaaatcgcgcgggcgggcggtacgcagcgccagacgcgccagaatacgttcgagatcgccgacctgacgcagtaccggctgcagctcggtatagcgttcctgtaaggcgccaatcgtttgttggcgttcaaccagcaccgcggtatcgcgtaccggcatatgcagccagcgtttgagcatgcggctgcccatcggcgtgaccgtgcagtcgagtaccgaggcaagggtgttatcaacgccaccggcgagattctgggtgatctccagattgcgacgggtggcggcatccataatgatgctgtcctgctggcgttccatagtgatggagcggatatgcggcagcgaggtgcgctgggtatctttgacgtattgcaacaggcagccggcggcgcacagcccgcgcggggcgttttcgacgccgaagcccaccagatcgcgggtgccgaactgcaggttgagctgctggcgcgcggtatcgatttcgaactcccatagcgggcgacggcgcaggccgcggcggccttcaatcagtgacgattcggcaaaatcttccgcatatagcagttccgccggattggtacgttgtagttccgccgccatggtctcgcggtcggccggttcgctcaggcgaaagcgcccggagctgatatccagcgtcgcgtagccgaagcccttgctgtcctgccagatggcggccagcaggttatcctggcgctcctgcagcagcgcttcatcgctgatggtgcccggcgtgacgatgcgtaccactttgcgttcaaccggccctttggtggtggccggatcgccaatctgttcgcaaattgcgaccgactcgccctggtttaccaactttgcgagatagttttccaccgcgtggtggggaatgccggccatgggaatcggttcgcccgcggaagcgccgcgtttggtcagcgagatatcgagcagctgcgaggcgcgtttggcgtcgtcataaaacagctcgtaaaagtcgcccatccggtaaaacagcaagatctccggatgctgagccttcagcttcagatactgctgcatcattggggtatgggcgtctaaattgtcgattgtgctcatagggtgttatccaggtccctgatttttaatagagtgcgattttattattgtcgtcgttatcgcatgaggaagacatgataacggagataggcatttgagggaaagtgacgaagtagatgcagcgatcctgattccacttcgcgaacgcgcggccatcgctaagctggccgcgcgtgacgttcagggcgccagataaacctgtggaatcgctttttccggatgctggccgaggcgcacgtccgcgccgtaccagcggctaatgatttcctgctggataacctgatgcggcgtgccctgcgccaccacctgtccctggtgcagcagcagaatctggtcggcccacagggcggcgaggttgagatcgtgcagcaccacgcagacatgtagctggccggaagcggtcagccgcttgagcaggcgtaacagatgctgctggtaatagagatccagcgccgaggtgggttcatccagaaacagccatccctgcggcgcgccgttttgccacagctgcgcgagacagcgggccagctgtacccgctgctgctcgccgccggaaagcgacggatagcgcctgccgcgcaaatgatcgcagccggtttccgccataacatcgcgcagagtctgcggactggcggtcgcttcccacggcgagcgccccatggcgataaccgtttccaccgtccagtcggcctggagtggagtgcgctgcaacatcaccgcccggcggcgcgatagcgcctgcggcgaccaacgctccagcgctttgccgtccatcatgcgttcgccgctatccggggtaaggaagccggttagcagccgcagcagggtggatttgcccgcgccgttcgggccgatcagcgcggtcatctcgccgccgcgaagcgtcagcgaaacctggtcaatcacctgacgttggccgagccgcagcgacagaccttgcgcccgatagttgttatccatggattggtttctcccgacgaaatatcaaccacaggaaccacggcgcgccgagcaggctggtcagcagccccaccggcatctccgccggcgcggcgacggtgcgcgccagggtatcggcaatcaacagcagaatcgcgcccgccagcagcgagccagggataagcccgcggtggtccgcccccagccacattcgcatcagatgcggcaccaccaggccgataaagccgatgacgccgcttatcgccaccgccgcggcaaccagcaccgcgctgcataacaacagcagccgctgtagcgcccgcacgttaacgccgagatagtgcgcctcttcatcgccgagttgcagcaggttaagacgtgttgccatcctccacaccgctattgacgccggaataatcaggctggccgccaccagcagcgtcggccattcggcttggccgaggcttcccatcccccacagcgacagctggcgtagctgagcatcgttgcttagccaggccagcacgccgaccagcgcgccgcataaggcgttgatggcgatccccaccagcagcagccgcgacagcgaaccgtcgcctgcgcggctgaggataaaaatcactgccatcaccgccaggctgccgataaacgccgccagcatcggcatatacagagctaacagcgccggcacgctgagcggcaacaccagccagcaggccaccgccagcgccgcgccgctgctgatgcccagcagccccgggtcggcgagcgggttgcgaaacagtccctgcatcacgcagccggacagcgccagcgcggcgccgaccagcagcgccagcagcactcgcggcagacggatcgtcagccagatatggcgcaggatttcatcgccggagggcagcaggttgaccaatggcaatcgcattgcgccgagggtggtggcgtagagcgtcaatgcgaccagtagcagcgccatcaacagcaaatggcgaacgagggcagggcgcatcagggcaactgctccgcttttttccgcagttcgaggatcgcctgcggcgtacgcgggccgaagccaagcagggccatatcgtcgatcgccagtagctgtttatggcggccagcgggcgtttgcgccagaccgggcaatttccataacccgctttcgccgcccatccccttgagaccatcggcggaaatcaccaccagatccgcctggcttgcggccacgccttcctgcgacatcgcgcgataatggtcaaagccctgcattgcgttttgcagcccggcggcgcggatcgcgccatcggcggtggtgtgctgtccggccaccatggtattcatcccgccgtggctgaggataaacagcacccgtttggcgataggccgcgagggaatggcggatatccgctgcttgacctgctggcgcagcacgtcgcctgccggagttttacctaatgctttggcaataacggcgattttgttatcgatggcggcaaggttatcgccgcccggcacgttgacgaccgtcaccttgctgtcctgcactttctgcagcaccagcgacggctgcgcctgcgcgctggccagcaccagctgcgggcgtaaggagaggatcccctcggcgtttaactgccgtagatagccgacatccggcagcttatgcgcggcggcaggccaggtgctggtgctgtctttcgccaccagctgctgcccggcgttcagcgcgtagacaatttcggtaacgtcgccgccgagggaaattactcgttcggcggccgcgctggcgaacagcggcagtgcggcaagcagtattaaccaacgtttcatgccggctgcccttccgcgcacagacgcgccacctgcgcgcgccactgttgttgctccgggtggccttcgctgcgctggccgtacagctgggcgatttgcgtaccgtctttggcaaacagttcgacgctggtgacgtggccatcggaggtcggtttacgggtgacccagatttcatccacgctgtcttcacgcagatgcagggtaaaggcgctgttgaagatgttgatccagccgcgcatcggcgccagcttttccagcgcgccggtgaagatctgcacgcagccgcggttgccgacgaagatcatgatttcattgccgtcctggcgcaccgtttccagcagtcccggcagcgcattattgtcgatgcggcaggccagatcgtcgctcaccaggcggaaggcctgctgacgggaaagattgtgtttacgcagcagaccgaagaactggtgcacatcggtcatcgcgcgccactccttttccagcgccgcggcgtcggcggagtcggcgtactttacgcggtcggccgggcgaatcgtcagcgcgccgggcgccgtctcgctgaatttggctaccagcgtttgccatgccgccatatcggttttcccggtggcgtaaacctttagcagcgcatcgccgtgcgggtcgaagaactgaatgctctggcggccgttatcgttgaggtggaacacgctcgaccactggctgaggaacaggcgcaggtcgagcgcccgcgggttgagcaccagcccggcgtggccgctcaggtgctgatgggtaaattcgccgacctgctcgtgcaccgcgtattcgttgcggcagatgcatttggtttcgccgacgctctccagggcggcgataatcgcccgtacgtcgtcgtgcagacgcacggcatcgtgaccgacgcgcgcggcggttaattcggcttcgctaattcccatctctgcggcgatgtcgcgggcatatttggcggtggagcgggctttggtggcctggtagcgctgccacagatcgtcgtgtgcgttttgcataattcacatccttctctacgatgaatttccccggcccgcgggccggggggcaggtttgttattattcgggcgatcagaaatcgatattcacgcccagttgccaggtccttccgggcatcacagccagcgctttatcgttggcatcctgattggtactggtctcgatgttgcggctgctcaggtagtcccagtatttacggtcggtaatgttgtaaaccccgccgttgagacgaacgttcttcgccaactgccagtaagcggtccagtccagcatgccgtagcccggcacgcgcatatattcggtgctggaatcggcgatggcggagccggtgttgttgtagctctcgcggctggtggcagtggcctgtttgcccttaacaaaggtggcggtcagcgccgtaccgtagcgcttagccggatcgtcccacgccacgccgacgatcgctttcatcggcgcgacgctgtcgaggtcgacgtatttatcgccgtagtagctggatttcgatttcccttcgctatagccccaggcgagggtggcgctcaggccatccacctgctcaaaccaggtgccgaagttaaatttagtgctgatctcgccgccgtagatataggccttatcgcggttttccgcttgataaatggtgtaaatattcgacgggacgttagtgaatttacccggattgttggcgcgcgaataacgcgtataggcgataaagttcttatagctgttgtagaacagcgcggtacgcacggtgatgccttcggtgacttctcccttgataccccattcaatattgtcgctggtctcggttttcagatcgttgttaccgattagcgcgtactgctggctgccggcatagctggagcccaggttccacgaaccatacagctggctggcattcgggaactgcgcgccgcgctggtactgcagataggtcatcagccgcggcgtaatgtcgtactggaacgtcagtgacggcagcacctgggtgtcgctgtttttaccatacagattcgccaccgacgattcggtgagcacgctgctgttggcgctaagatcggacagatcttccggtttagtggactgatgcgtcacgcgtacgccgggaataatcgcgaagttgtggctatcgagatcgaagttgatctgatcctgcacgtaaccgccgatggtgtagctacggctgtccgcttccggctgcataatttcgctgtagacgctggggatcggcgattggctaaatggccgctgggttttggtcgtgctggcgttaaaaccggcgctcaggtcgtggcggccgatgcttttcgcgagcgcggtctgcaggccccaggtatcggtatcgtagtcggaattgaccgtctgcattttgcgggtgacgctatccggcatccaggtccagtcgtgagcctcggtatgctggtaatacaccttggtcgagacgctgtcgatgtaatcgttcatcggcgtccagtcgtctttcaggctcagcccccagcgccgcgtctggttggtttggttggcggtgccgatcacgctgttaccgctggagtcccacgaatcgaagtggctgtggttggtcttgtgatagtagtcgaaggtgctggtgaacttatgttcatcgttcggctgccagatgccggaggccataaacgcgtcagagtgccagtttgccgggtaagcgtcgacgctgccgctgttgttctcggtttcctggccatcgcggcggctgtagacgaaaatgccgcgcagcgtttcatcgccgccggcgacggtgacgccgttatgccagctgcggtcggaagagtcgtagccgctctgatagccaaaggcgctggttttgcccgggcgcagatagtcatccgccgatttcgggcggaaggagacgttgccgccgattgagctgttagcggtctcggttgaggtggcgcccgactgaatatccacgctgccgtacatataggggtcgatataatcgcggccaatgccaaaggtgttgaggccggaacggccaacgtagccgcggccggtggcgtttggctgggcaatgccgtcaacatcgatgccgacgcggttgctttcgaggccgcggatgttgtagccggtatagccgccgcgatcgaaaccgcttttaccgttgccggaaccgccgctggcgccggtggcgctgatgaggggttcataacgcatgattgagccgaagtcgttggcgcctttgtcctgcagttcctgcgcgctcaccgagtgctcgttgccggctttcagctgtggggccggggcggtcaccaccatctgttccgcgctatccgtcgtgttatcctgggtcacggccgcgatagcggcattctgcgcgattgctgcgagcagagaagtcgccagcaggcttttcttacaccatgctgctgattgagtcgatttgtacatttgtagccacgccttgataattattagtatcggctcacgcgttacttccagagtgcaggttggtccgtgttttccctggcggacagtggtattcctgatttagtaattgcgaatggtaatgataggtattatcgtttgcaacaaaataatcatctattctgaattttgtttacattcgtgcggacgggagcaagccaacatgagccataaagcgatgattaccattcactactgttcccaatgcaactggatgctgcgcgccagctggatggcccaggagctgctgcatacctttagtaccgatatcgcttcggtcacgctggtgcccggtaccggcggcatttttacggtgagcgtcgatgaggcgctcatctgggagcgcaaacgggacggcggtttcccggacgctgccgagctgaaacggcgggtgagggacgtctgcttcccggaaaaagcgctggggcacgtggataatgccgggaagcaggtctaaaacagctggttgcgattaacgtcctagttcaacgttgaccagtacgctttgtcggcgagtgcgaataatagcgactgcctcttccagtaccccggggagatcttccgccagcgaaaccgtcagcgcagccgcgcggcaggaggcggcgagcgcggcgaaatctggcgacgacgagaacgcggtggccgggatagcgtccattttggcggcatagccgtcgggatagagcgctttggtgccgcccgctaccgctccccagccgccattgttgccaaccaccaccagtacgggaagcttcatcacttccgcgatgtgatgacacaccgccggattggcaaagagataggagccgtcgcccacggcggcgatgataagctcaccccgccgggcgagctgcagccctaaggcgatgggcaacgcttcacccagaccgcccgccagcgcttcctgataataactgtccgcctgagtcaggccggcaaactgcggcattgttgtcagttcagagacgatcttcccctgatgttgattggcaagctgacccagacagtaactcagccagggtttgccaattgcccctttttggttggcgtggaggagggcttcacgttggttcttcgcgtgttgtatcaggttaagcacatgcttttcacgttcagccacctgccgttgcttcgccgccacaagcggctggagcgcctcttgtaaaagttcgaatacctcgtcggtttctccggccaggttaatatcggcgcgataaccgcggacggggtagcgggaaaaaagcggatcggggccgatctggatcaccttacagctgtcgttgcagcggctttcttcgatgatccacggggcctgcgagtcgataacgatgatgacgtcggcggcagaaagccagccttcgggatcgctgcctgccagcataggattgtcgctgccgagggtgacttcagtgccccagtattccaccaccggaatggcccactccttaaccagggtattgagccgcgcaaagccaccagacgttcttgcgccgcgctgggcgaagatgaccggctgtctggcattggctatcgcatcggcggcgctggcaatatccgctcgcgttggcgcgtagcgtaccggctgttgggttggttcggcatgaagcgcttgttcatcgatcgtgaacgtttcgcatagcggctcgcgcggcaggctcaaatacaccggcccctttggcaatgaacgggctatcgcccatgctctgtcaacatgctcgccgacctgatcggcaatgcgtaattcaaagtcccatttcaccgactcgcgaatgagcgccgcctgatcgcgcatctcctggccgtagccaatcggcgtgttgcgacaaccaaagtgtgaatgctcgctaattggcgtacgtccgccaaaaatcagtaccggaatattgctgttggccagattgatgacgccgcaggcggcattggccaggcctacgttagtgtgaaccatgacggcctgcactttcccgctcccgagataatagccatgggccatgccaatagcggcgttctcgtggggacatatcaccagctccggtacctgttgtcccgtggcgcgcattttggcccacgcttcaataaccgggggataatcggtacccgaattaataaaaatataggccacgtcgagggcctgaagccggtgcagtaataattcagcggccgatacagtgatagaagtcatattctctccggattaacgcgatgttatcgccgtgattaaaaggtcaggaaaataaatgcgcccatcgtaatgatggaagtaataatacttagcgccatggtcgaggccatttcttgctcgccggacttatattgcatagcaataataatggcgatcgagcccacaggaatcgccatcgttaataccacttgttttatttgctccatgctgaaacccatttttaacaaaatgaggtagcaggcgccgggcaccagaatattacgggcgatgacggtaataatggtggcggaggtgatgacaatgctgcgagtatagagcacgatgcctgcggcaaacagcgccagtccgccggaggccttacccagcagacctagcgacattgatacggtttctggaatatgaatatccattaatactaatatcagcgcgacaaccggcgaccataccaccggctgcttgatggcgttgatgacccgcgtggcaaaagagatattctggcttttatcccccgttgcaacggacatcagaatcatcaccagcgggagctggaagacattttgcgtaatactggaaacagtaatgagtgaggcgctgacggtaccgaataaaaaagccagtaccgaggtgccaatgaagggaacggccggcgagccgatggccagagcctgtagggtactgagcgccagggagcgtttacagatataacgggcgatagctaagggaataaggaaactcagaattagcgccaggataatggcgatagcgaccggccccatgctcatcacgatatgccgcggcgtcatgaccatattactgaaaatactcagcggtaaagcatacagcattacaattttattaatatcaccagcttgctgccagttgaagtctttgcgtttaccgctgatatagccaatgagaacggtaatgataacgggtaaaatagcgccgaggattaatagaatgttgttctgtgtcatagtgatttattctcattataaattatcgttagggtcagggtgttgatctataaatattgagagtgtttcccacggaaatgcgccgctgttgcacttttcttttttttcgttgcttactgcattcttgacgcaaaaagaagcgccagggaaatgtaaaaataattcgttcaatgagtaattgtcatggctatgaaaattaaacagatacaagcctttcttaccgtcgccagcgaaggaaatttaaccctggctgcggagaaaatggggattacgcaatccgggctcagccgactattgctgaccctggaggaggatctgaatgccaccttatttgaacgacataagcatggaatggcgttaagcgagtatggcagcgcgtttttaccctatgccatgacaatgttgaacacggagaataaagccagagaggaaatggcgctgatccgcggggcgggcaaggggattttgagaatcggctgcgtatccagtctgttaaccagccattttattgataaattagccgcctttcataaacgccatccccagatacacatcaaaatattcgaccgcattgactcagagttgtttaagttgctgctgatgcatgaaatagatatcgccctctgcgggcctttaccgcacgacgataaaatcgtggttcgtggaaaaattaactggcaggaccgtatttgtatcatttcaaggccaggccatccgctgcaaaaagaaaaacgtctgtcgcttgcagcgatgctcgactatccgtggatcatgccgccgccattaagcacgccgatgcttatcctcgaagatatttttcgctcgcatcagctgccctgtccggttccgattatcgagtgcgcttcatccgcagcgataaaatcctttatcgctgagagcgatcttttaacgtcaatgcctgctcccgtctatcgactggaagagaagcttggattgttgcgcccgctggaagcggaaggcagcgtgtttgtccgagatttctatgcctggagccattttggcgtgttatccggagccgcgctgcagttaatccagcatctgaagcagtgagatgccctgacagacacaaaggtgtataatcaatgcatcttattggcttgaggctgtgacatgggcaaacgcatcgatcgcgaaaagaagactatcggcaatatgatcaggctttatcagcgccgctgcccggatgcgcgcaacgacggcgaacattacctggcgcttaacgcttacgccgacaagcggctggataagtgcgtatttggtgaagagaagccggcctgtaaacagtgtccggtacactgctatcagccggcgaagcgagaagagatgaagcggatcatgcgctgggccgggccgcggatgctctggcggcatccgattctgaccattcgtcacctgattgacgacaggcggccggtgccggagctgccagaaaaataccggccgaaaaaatagcggcctttccacggtttgcgctgcgcttcgtcggcaccggggattgcggttaaaggctcgtagatactgctatcggtttgcaactttttcgcttgagaaaaacgtttatcgcgtgtcgcttcagaggatattgcgctcccgtttgatttttatgcaatatgttttccgtggcgcagggagcgcacaaagggcggccagtcgccgccgccctctgtactcccgggctttggccgccaaaatcgccacttcgtggttccttcgacttatccctacaggcttcgggtcgggccgaggctgcgtccctgcaagtcacggccctcagcccgcatccatgcgggctgccccggccttccgggaacgtctctgcgattttgaggccaccaacaccggcagtttcagccagcatggtgaataaattaaaggcaggccgcacggactgtaggtcggataagcgtagcgccatccgacaattctccctgctcgcgctggcgttaaccgccatcggagatcgttgctgacgccctttgtttctgaccgtcacggatagtactggcgacaaaggccagcacgaacagcgcggtaaatagcaccacgatggttggcgccggcgcgctatcgagataaaacgacagccagacgcccgccagcgaacagcccacggcgattaccgttgccagcaataatgcgctgacaaagcgccgcgtcagcagcagggcgatagcgccgggcgctatcagcagcgaaatcgacagaataatccccaccgactttaacgtcgcgacgatagtcagcgcgatcatgcacagcagaccataatgcagcagcccgcagcgcaggccgctggctttggcctgattgggatcaaaggcgtgcagtaaaaaatcgcgccactttagcccgataatcagcgcaatcgccagcgcaatcaccgccgtttgcccgatatcgctggcggatattcccagcatatcgccaaacagaatatggtcgagatggacctcggattgaatcgccacgtacagcaccagcccggcgccgaacatccccgagaagacgatccccatgatggtatcgcgcttgatgcggctgttatcgtcgagaaaaccggtggcgacggcgcagaataagccggcaataaacgcgccgatggcgaaggggatgccgataatgtaggccaccaccacgccgggaaacaccgcgtggctcatggcatcgcccatcagcgcccagccttttaataccagaaataccgacagcagcgcgcaggggacggcgacgatcgtcgccaccagcatcgcgttgaccataaacggaaactgtaatggttcaaggagcatcgttagcatgaggcctccctggcgcggcggcggttggccagcaggccgtgcttcggcgcgaagacaaaggtagctaagaacagcagcgtctgcgccaccacgatgatgccgccggtggcgccatcaaggtagtagctcagccatgcgccgaagaagctggtcaggctgccgatagcgacggcaatggccagcagacgcgggaagcggtcggttaacagccaggcggtggcgccgggcgtcacgaccagacagatgaccagaaacgcgccgacggtttgcagcgccgccacggtgcaggcagccaacagagtgaagaacagcagcttcaggccgctggtgttaaggccaatcgagcgggcgtggttctcatcgaagaaggtgaccatcaggtctttccacttcagcaacaggatcgccattgaaataaagccaatcgccgccagctggataatatcctccggagcgatggcgagaatattgccgagaataatagtttgaatgttcaccgaggtcggattcagcgacaccataaacagaccgatgccgaaaaacgaggagaaaatcagcccgatgatggcgtcctctttaagccgcgaacgctggttaagaaacagcatgctgcctgccgccaggccgccggagagaaacgcgccgagcgcaaagggcaggccgagcatataagcgccggcgacgccgggaacgatcgagtgggagagggcgtcgccaatcagcgaccagcctttgagcatcaggtagcaggagagaaaggcgcagacgccgccgactaatgccgagacccacatcgcgttgagcatgtattgatagccaaacggctccagcagccagctcatcgttggccccccgccgcgcgatggctgataaacggccgctcatcgtcggtaataatgcgctcttccgcgccggtgagcgtgacgtggcgcaatacgccgctgaaggccagctccaggttgtcggcggtgaaggtggtctccgtcgggccgctggccagcacggtgcctttcaccatcaccgtataatcgcaaaattcgctgactgaaccgaggttatgggtagaaaccagcatggtacagccttcgtcgcgcagttctcgcagcagggcaatgatccgcgcctcggtctgcacatcgacgccggtaaacggctcatcgagcaggatcactttgccttcctgagcaatggcgcgggcgaggaacacgcgctttttctgcccgccggagagctcgccaatttgtcttttgcggtattcgctcatccctacgcgggccagcgcggcatcaacaatctgccggtcgcggggcttcgcccgccgcagccagcccatatggccatagcggcccatcattactacatcttccaccagcaccggaaaagaccagtccacctcttccgattgcggtacgtaggcaacaagattttgccgaagcgcgcggttgaccggctggccgagaatggcgatatcgccgtggccgacgcgcacgaagcccatcagcgctttgaacaacgtcgatttaccggagccgttgacccccaccagcgcggcaatcgatccgcgcggtacgctgaacgaggcatcgcgcagggcggtgtggccgttgcgataggtcaccgtgacctggtcgacgataagtcccgcttgtggcgcaatcatgactgtttcctcaggccatcgttgatccctttgacgatggtttcggtggtgacgcgcagcaggtcaagataggtcggcaccgggccgtcggcggcgctcagtgagtcaacatacagtacgccgccatagtgggcgccggcttcacgggcgacctgtcgcgccggtttgtcggagatggtgctttcactgaagatggtcgggatatgctccttcttcatggtgtcgatggttttacgcacctgctgcggcgtgccctgctggtcggcgttaatcggccacagataacgctcctgcaggccgttatcgcgcgccagataggagaatgcgccttcgctggtgaccagccagcgtttgtccgccggcagtttcgccagttcggccttcagcggcgccatggtctggcggatcttctctttgtaggcctcggcgttacggcgataggtgtcggcattgacgggatcgtatttcaccagcgcatcgcgaatgttatcgacgtagatcagcgcattatccgccgacatccacgcgtgtgggttgggtttgccgttgtaggggccatcgctgatacccatcggctgaataccgttgctgaccacgacttccggtacgccgttcaggtgctgataaaaacgggcgaaccacagttcgaggttgagaccgttggcgagaataagcttcgccccctgcgcgcgtttgatatcgcccggcgtcggttgatattcgtgaatttccgcgcccggcttggtgattgagctgacatcggcggcgtcgccggcgacgttctgcgccatatcggcgatcacggtgaaggtggtaatgactttaaatttttcttgcgcctgagcgggggcgatggcaagcagcgctaatgcggcggagaacaacaggcacttgaacggcggcagatgcgtcataggatccctcacggtattgcgattaattaatcatcgtttatagcctttgctatgttatatagcacaagctatttataaatgaaaataattcttatttagatgttggggtaatgattaggctgagaagggattggggagggagggggaatccggattcggtccggcaattgatgggggccgcgttattttgtcggatggcgctacgcttatccgacctacggtcccgcgtgatttggtagcccggagaaggcgcaatgcgccgcctccgggagaatccttaagccattagagacatatcgccgggctagactaaccgatccttattaatgcctaaacgcttcatgcgcgacagcagcgtcgtgcgcttgagccccaggcgctgggcggcgccttttggcccggccaccacgccgttgctctctttcagtacccggacgatcagctgatattcatcttcgccttcctccggcagcactcccggcgccagcgtctcctgttcaatatgcatttccggcagcgacagttgcagtacgttgccgcgggtcaacaataccgcgcgctcgacgacgttttccagctcgcgcacgttgcccggccactccatgcgcgaaagcgtgcgcagggtctccgccggaatactgtcgatgttgcgccccagacggcgggcgattttgaaagtgaatgctttcaccagcagtggaatatcatccgggcgttcgcgcagcggcggcaggtggatcgggaacacattgagccgatagtaaagatcgctgcggaattcacgatcgataaccatctgtttgagatcgcggttggtggcggcgatcagccgtacatcggtctgaatcagtttattgctgcccagacgttcgaattcctgctcctggagaacgcgcagcagcttcggctgcagttccagcggcatatcgccgacctcatcgaggaacagcgagcttttgtccgctagttcgaaacggccgatgcgctgggcgctggcgccggtaaaagcgccgcgctcgtggccgaacagatcgctttccagcaggcccgcgggcatcgccgcgcagttcattttcaccatccgtcggccgttgcgcccgctcaggttatgaatagcgcgggcaatcagttccttaccggtgccggtttcaccgaggatcagcaccgtactgtcgctctgcgccaccatctccacctgtttaagcacgctgtgcatcgcttcgctgcgaccgatgatttcgccgaactcgctttcgacgttgttgagctgttcggtgagcgccaggttttcatccaccagccgttctttcagccgctggatctcgcggtaggcgagggcgttatcgatagctatcgatacgcgctcggcgatttgccgcagcagtttaaggttggtggtggtaaatacttgctcatcgcactgcgccagcttaagtaccccgagcagcgtattgccggacatgagcggcaacaggcacagggtctggatctggttatcccacatctcgaagagcattttctcatacggcgccagcgagtcgtgctcatgcagattgagtaacagcatctctttgctcttaaacacccgctcggttagcgtgccggcttcatcgacttcgctttggtcgtggaccggatggctggcgtcgagatagtgggtagcgtagatgttaagcttgcctttgcggttgctgcgcagcaccacgctgatggcgtcgatgcggaaatagcggtggatctctttcgccacctcgctgaccagctcgtcaatatcgaggcgcgacaggacggcgttggtgatggccaccaggatgcggaagttatcgcgctcgtggcacagcaggtcgtaatcgacgttgttgctgacccggctttggatctgctcggtcacgacggcgacaatctgcgcgaaagtatgcaggcgctggtactctttttcgctccatggccggttgtcgtcgcggatgaactcacaaccgccgaagatgcggccttccgccgccagcggcagcaggcagtagtagccgaattccgggtaaatgccgctggcggccagctgcggccaggtttcggcgaaggtcacgttgtcgcaatgtagcgcgtcggggcgcgacagcaggcggcgtaccgggccgtgcgccagtacggtttcatcttcgtagcttgccggctgcccggcgtcgtcgcaggcgtacctggcggcgcgatggttgccgtggttccacaagataatcgccgcccggtcggcaagcgcggattgctgcaccagacgggttagcgtttcactcagcgcggccagatcgggctgctgtaataaaatacgggtgatatcaaacagaccctgctgcccgagatcgcccattggtgtatacgacattgcttaagtccaaaaagcgccgcagcgcggcgcagaataaagagatgaatcaaataatagtctgttaataaaacaattgttgccgttgttgaggtcgcccggataaggcgaaagccacaatccggggtgggttcaatggttaacaaattctcggcagcggttcggcgtggggaagatcgagcgtccgtttaacgccatataacccgacagagcgcacgccggcgcgctcgacaacgtcgccaattatcgcggcattctgtccgagcgggtgagaccgtaaatgctcaagtaggcgcggcgcggcttctctggcgacggcaatcaccagtttaccttcgttggcgaaattcagggcgtccagccccagcagttcgcagacgccgcgcaccgtatcgttgaccggcagcttcgcttcatgcagttcgataccgcagccgctggcggcggcgaactcgtgcgccaccgcgttgacgccgccgcgggtggcgtcgcgtagcgctttgatgcccggaatctcgcgcagggtctggataagcggcgtcagtactgcgcagtcgctggataacgcgccgtccagccccagctgttcgcgcaggttaagaatggtggcgccgtgatcgccgagcgttccgctgaccagcagcacatcgccggcgctaatctgctgcgctccccagtgaatatcgccggggatggcgccaataccggcggtattgatgaataatttatccgctgcgccgcgcggcaccactttggtatcgccggtcacaatggcaatcccggcctgctgagcggtagttgccatgctgcgcaccaccgcttccagcgtcgccatctccagcccctcttcgaggataaacccgcaggagagatagcgcggcagggcgccgctgaccgccacgtcgttggcggtgccgcagaccgccagcttgccgatatcgccgccggggaaaaacagtgggtcaataacatagctgtccgttgagaaggccagccgatcgccctgggcggcaagcccggcgagatctaaacgcgcctgatcttcctgttcggccagccaggggttggcgaaggcctgcataaacagctcgccaatgagttgctgcatcgcctgaccgccgctaccgtgagctaactgaatgcttttcatgctttattttcctgactgcgatattgataccaggcggcgcaggcgccctctgaggagaccatcagcgcgccaaaggcgctctgcggattgcagacgcggccaaacagcggacactggtgtggtttacaacgcccggtcagcacttcaccgcagcgggcgcgcgggtcatcgcaaacgcgctgcggcgccgggcggaaatgggcctcggcgtcaaagcgttgataatctggcgtcaggcaaacgccggaatcgttgatcgtccccaggccgcgccattcgctatcgccgctcaggcaaaagacttcggcgattgccgcctgcgccagcgcgttaccggcatccggcaccacgcgacggtactgattctctacctgactgcgctgcgctattttctgctcaaccagcatgatcacgccttgcagtagatcaagtggttcaaatccagcaacgactaatggccgatgatagtcgctggcgatgaaaccgtaggcatcagtaccaatcaccatactgacgtggccgggggcgagaaacgcatcgataccgttgtccggctggtccagcaggctgcgcagcgttggcagtagggtgatgtgctgacagaaaaagtagaagttgccgacgttgcgctcgcgggcctgacgcagcgtcagcgcggtggcgggcatggtggtttcaaaaccgagaccgaaaaacaccacctcgcgctgcggattctgctgcgccagccgcagggcgtccatcggcgagtaaacgattcgcacatcggcgccgcgactcttcgcctgcagcagcgacccgttttttcccggcacgcgcattgcatcgccaaaggtgcagaaaatcactcccggacggctggctatctcgatacacgcatcaatgcggcccatcggcagaacgcacaccgggcagccggggccgtgaataaattcaatattgttcggtaatagctggtcgaggccgaatttgaagatggcgtgggtatggccgccgcagacctccatcatccgcagcgggcgggcttcactgtagtccagcagccgggcgcgctgctgcagatgttcgaccagctgcagcacctgctccggcgcgcggtattcatcaacaaaacgcattatcgctcctcgccgtatagcaacgcgccgacgtccggttcaacctcgaacatgttttgcagcgcgtcgagggtatcgcgcgcttcggcttcgttaatcacgctcatggcgaacccgacgtggaccagcacccactggccgatgcgcggctggccctgttcatcgacggcgccgaccagggtcagatcgacttcgcgctgaatgccgcacacttccaccttcgccatcaccccgtcaatcgtgcgaatttgccccggaatgcctatgcacatcgctgcgtctccagccagttaagccactggtccatgccttcgccgctggtggcggagagcaaaataatctcgatatgcggattcacttcccgcgcgcaggcgaggcatttctcaacgtcaaagttgaggtacggcagcaggtcgactttgttgagcagcatcaggctggcggcggcaaacatatgcggatacttcagcggtttatcttctccttcggtgaccgacagcaccgccactttatgacgttcgccaagatcgaagctggccgggcagaccaggttaccgacgttttcgataaacagaatgccgttatcgccagccggcaggcgcgcagaggcgtcggcaatcatttgcgcatcgagatggcagcccttgccggtattgacctgaatcgccggcgtgccggtggcgcggatgcgcgcggcatcgttgaccgtctgctgatcgccttcaatgaccgcgcagtcgacgatgcctttcaggcgggtcagggtttcggtgagcagggtggttttaccggagccgggactggagaccagatttagcaccagttggttattcgccgcgaagcgcgcgcggttgcgcgccgccaggcggttgtttttatccagcacgtcgatttcgacttccagcatccgccgctggctctggcccggcgcgtgggtaccggcttcgccgtggccgtaatgcagatcgccttgcgcgctgcgggtcggggagaagttatcggttttcacgccggtgatggtcatggtctggcgcggggcgggagcgaagggggcgctgcgaaacgccgagtgcgggttatgttcatcgccttcgatataaaggttgccttctccgcagccgcatgtcgtacacataatcttttactccaattctaaacgctgaatctgtaagccatcatccgccacgatctgcaactggtcgttatcgcagtgcgggcagcggcggacgtgctgagagacaagatgcacatactgctgacagcgttcacaccagcattcggcctgttgctcggcaatgtgcagcgcgcagccttccgccagcgtgccgcggcacaccagttcaaaacagaaggtgagggcgctggcctccacgcaggaaaacgcgccaaccttcagccacacgccggtgacccggcgcgcgccgttttgccgcgcctgttgctcaataatttccagcgcccgctggcttagcgtgatttcgtgcatattggcctccgttaatactatggcggctatatgcaataacgatgccaggagaccataaacggtgggggaactgtcgatgacgacgacgtgcggctgtcatcgacatgtcgtgatggtgcgtggttttataataattcctttaaattcaaataaataaattttggcatggaaaatgcttaaccggtgcatctcatgtaacgggaggatccgggatgacaatttgggaattaagtgaaaaggcggactacatcgccgatcgtcaccgccagcatcaggagcagtggcacacctactgcaactcgctggttcagggcatcaccctgtcgaaagcgcgtctgcatcacgcgatgagctgcgcgccggacaaagagctgtgcttcgtgctgttcggccactttcaggtatatgtcgcgctggcggaaggctttaacagccacaccatcgaatactacgtagaaagcaaaaatggcgatgacaaacggctgatcgcccaggcgacgctggatgcggaaggcgtaattgacggtcgcatcagtaaccgttcccgcgaagcggtgctggaacactacctggcgatcatcgccaccgtctatgaccgcctgtatgaggccatggagcgcgaccagccggtggatttaagccatctggcgcaggtccattaattatgaagtgtcgacaagtgtcgaaaccgacacctgcgcggcctgatttcgtcaaaagtgactttcacccgaggatgacccggtgaaccgttttgtaattgctgattccagcgtctgtatcggctgccgcacctgcgaagccgcctgttccgagacgcaccgccagtatggcctgcaaagtatgccgcgcctgcaggtcatgcgtaatgaaaaagagtctgcgccgcagatgtgccaccactgtgaagacgcgccttgcgccgcggtgtgcccggtcaacgccattactcgcgttgacggcgcggtacagctgaatgaaagcctgtgcgtgagctgcaaactgtgcggcatcgcctgcccgttcggcgcgattgaattctccggcagccgcccgttggatattcccgccaacgctaacacgccgatggcgcccgccgcgccgccggctccggcccgcgtcagctcgctgctcgattgggtgcctggcgttcgcgctatcgccgtgaaatgcgacctctgccactttgatgagcagggcccggcgtgcgtgcggacctgtccgaccaaagccttagtgctggtggatattcgcgacattgctaagtccagcaagcgtaagcgcgaactgacctttaataccgacctcggcgatttgtcgctgtttcaggcgcaacaagggggcgtgaaatgagcgtggttgcattagtgaatcaggcggttgcctggtatgccgccagcgcggtgctggcgtttttatttagtttgcgtaaaccgctgagcggcgcgattgccgggatcggcggcgcggtcgccagcgcgatgttaatcgtcgccggcttctcggcgctgatcgcgccggagcggatcaacggcggcatgctgcagtatctgcatctggcgatgcgggtgggcgggattaacgctctgtggctgttggctatcggcctgtcggcgctgccgatttcgctgtttaacatttcctggcatcgtcatccgcaggtcaaatccaacggcctgctggttaacctgctgctggctgccgccacctgcgcggtggtggtgactaacttcggcagcctggtggtgatggcggaaatcatggcgctgtgcgccgcgttccttaccggctgcgcgcagtccggcaaactgtggtttgcgctggggcgtctcggtaccctgctgctggcgtggacctgctggctggtgtggtcgttctacggcactctcgatctggcggcgattagccagttggccgctggcgcgccgcagaacatggcgctgtggctgccgggtctgctcggttttgccctgctcgccggggtgatcccgctgcacggctgggcgccgcaggcgcatgcgggcgccagcgccccggccgccgcgctgttttctacagtggtgatgaaggtcggtctgtacggcatcctgaccgtgtcgctggccggtagcgtgccaccgctgtggtggggcgtgctgctgctggtgttgggaatgattaccgcctttatcggcgggctgtacgcgctgatggaacataatatccagcgcctgctggcttaccacaccctggaaaacatcggcattattctgcttggcctcggcgcgttcgtcaccggtattgctaccggcaataatgcgctgatggtgctgggctttatcggcggcatgtaccacctgatcaaccacagcctgttcaaaaccacgctgttccttggcgcgggggcggtgtggttccgtaccgggcatcgcgatatcgagaagctgggcggcatcggtaaaaaaatgccgctgatttcactcgccatgctggtggggctgatggcgatggccgcgctgccgccgctgaacggctttgccggcgaatgggttatctatcaatccttcttcaagctgagcaccggcgaggtgtttatcggccgtctgctggggccgctgctggcggttggcctggcgattaccggggcgctggcggtgatgtgtatggccaaagtctacggcgtcaccttcctcggcgcgccgcgcagtaaagaggcggaaaacgccacctgcgcgccctggctgatgaccttaagcgtggtgctggccgccgcgtgctgcgtcatcggcggcgtggcggcgccatggttgttgccgctggtcggccacgttattccggttcctgcgcaggccacaagcgtcgtgtcgcagccgctgatcgccattctgctgattgcctgtccgctgctgccgttcctgctgatgatcttcttcaaaggcgaccgcctgccggcgcgctcgcgcggcgcggcgtgggtctgcggctacgaccatgaacaagcgatggtggtcaccgcccacggcttcgccatgccggtgaaagaagcctttgcgccgctgctgaagctgcgtcactggttgaatccggtacggctggtgcccggctggcagaacgccgccgcgcccgccttgctgcgcggcgtggcgctgatcgaactggcggtactggtggtgattgtgatttcgcgaggagcctgagagtgaacctattcgttgcattaatacaggcgctggtactgtttgccgtcgcgccgctgctgtccggcctgacccgcgttgcccgcgcgcgcctgcataaccgccgcgggccgggcgtactgcaggagtatcgggatatcctgaaactgctgggccgccagagcgtgggcccggacgcttccggctgggtattccgcctgacgccgtttgtgatggttggcgtgatgctgaccatcgccgccgcgctgccggtggtgaccgtagattcaccgctgccggggctgggcgacctgattacgcttatctatctgttcgccatcgcccgcttcttcttcgccatttccggcctggataccggcagtccgttcaccgccatcggcagcagtcgtgaagcgatgctcggcgtgctggtcgaaccgatcctgctgcttgggctgtgggtcgcggcgcaggttgccggctctacccatattagcgtgattaccgataccgtttaccactggcccgccgcgcgcagcatcccgctgatcctggcgctgtgcgcctgcgctttcgccacctttatcgaaatgggcaagctgccgttcgatttagccgaggccgaacaggaactgcaggaagggccgctttccgagtacagcggcagcggtttcgcggtgctgaagtggggcataagcctgaaacagctggtggtgctgcagatgttcgtcggcgtatttatcccgtggggacagatgaccagttttagcgcgccaggcctgctgctggcgctggtggtcgccgtcgtcaagctggtgctcggggtgctgattatcgcgctattcgaaaacagcatggcgcgtctgcgcttttgtgccacctcccgcgttacctgggccgggtttggtttcgcctttttagctttcgtctccttgctggtggcgtgattaagagaatttgagcatgtctgaagaaaaaatcggtcaacactatcttgcggcgctgcaccaggcctttcctggcgtggtgctggatgaagcctggcagaccaaagatcagcttaccgtcaccgtgaaggttaactacctgccggaagtggtcgagttcctgtactacaagcaggggggctggctgtcggtactgttcggcaacgacgaacgtaagttgaacggccactacgcggtttactatgtgctgtcgatggagcagggcactaagtgctggatcaccgtgcgcgtggaagtcgacgctaacaaaccggaatatccgtcggtgaccccgcgcgtgccggcggcggtatggggcgagcgcgaagtacgcgatatgtacggtctggtgccggtgggcttgccggacgagcgccgcctggtgctgccggacgactggccggatgaactctatccgctgcgtaaagacagcatggactaccgccagcgcccggcgccgaccaccgacgcggagacctacgagttcattaacgagctcggtagtaagaaaaacaacgtggtgccgattggcccgctgcacgtcacctccgatgagcctggacacttccgtctgtttgtcgacggcgagaacattatcgacgccgattaccgcctgttctatgtccatcgcggcatggaaaagctggcggaaacccgcatgggctacaacgaagtaacgttcctgtcggaccgggtatgcggcatctgcggcttcgcccacagtaccgcctataccacctcggtggaaaacgcgatgggcatcgtggtgccggagcgcgcgcagatgatccgcgccattctgctggaagtagaacgcctgcactcgcacctgctgaaccttggcctggcctgccacttcaccggttttgactccggttttatgcagttcttccgcgtgcgcgaaacctcaatgaagatggcggagatcctcaccggcgcgcgtaaaacctacggtatgaacctgatcggcgggattcgccgcgatctgctgaaagaggacatgatccagacccgccagctggcgcagcagatgcgccgcgatgtgcaggagctggtggatatgttgctcagcacgccgaacatggaacagcgcaccgtcggtattggccgtctggatccagaaatcgcccgcgacttcagtaacgtcggcccgatggtccgcgccagcggccacgcccgcgatactcgcgccgatcacccgttcgttggttacggtctgctgccgatggaagttcacagcgagcagggctgcgacgtgatttcccgcctcaaggtgcgtatcaacgaagtttataccgcgctgaatatgattgatttcggtctcgacaatctgcccggcggcccgctgatggtggatggcttcacctatattccgcaccgcttcgcgctgggcttctcggaagcgccgcgcggcgacgatatccactggagcatgaccggcgacaaccaaaagctgtaccgctggcgctgccgtgcggcgacctacgccaactggccgaccctgcgctatatgctgcgcggcaacaccgtctccgacgcgccactgattattggcagcctcgacccttgctactcctgtaccgaccgcatgacggtggtcgatgtacgtaagaagaaaagcaaagtggtgccgtacaaagagctggagcgctacagcatcgagcgtaaaaactcgccgctgaaataaggaatcgccatgtttacctttatcaaaaaagtcatcaagaccggcaccgcaacccactcctatccgctggagccgatgccggtggataaaaacttccgcggcaaaccggagcacaatccgcagcagtgcatcggctgcgcggcctgcgtgaatgcctgtccgtctaatgccctgacggtagagaccgacctggcgactaaccagctggcgtggcagttcaacctcgggcgctgcattttctgcggccgctgtgaagaagtttgcccgacggcggcgattaagctgtcgcaggagtatgaactggcggtgtggaaaaaagaggatttcctccagcagtcgcgctttgccatctgtcactgtcgggtctgcgaacggcctttcgcggtacaaaaagagatcgactacgctatcgcgctgcttaagcacaacggcgatacccgcgccgaactgcaccgcgaaagttttgagacctgcccggaatgcaagcgtcagaaatgcctggtgccatccgatcgtattgaactgactcgccacatgagggaggccagctgatgagcaatttattaggcccgcgcgatgaaaacggcattccgctgccgatgacggtggatgaatccatcgccagcatgaaggcctcgctgctgaaaaaaatcaaacgttccgcctacgtttaccgcgtcgactgcggcggctgtaacggctgcgaaatcgagattttcgccaccctttcgccgcttttcgatgccgaacgcttcgggattaaagtggtgccgtcgccgcgccatgccgatattctgctgtttaccggcgcggtgacccgcgcgatgcgttcgccggcgctgcgtgcctggcaatcggcgccggatccgaaaatctgcatctcttacggcgcctgcggcaacagcggcggtatcttccacgatctgtattgcgtatggggcggcaccgacaaaatcgtgccggtcgatgtctatattccgggctgtccgccgacgcctgccgccacgctgtacggttttgcgatggcgcttggtctgctggagcaaaaaatccatgcccgccagccgggcgagcttgacgaccagccaaccgaattgctgcatcccaacatggtgcagccgctgcgggtgcgtatcgatcgcgaagcgcgccgtctggccggctatcgctatggccgccagatcgccgacgactatatgcgtctactggggcagggcgataaccaggtactgcgctggctggaagcggagaaagatccgcgtctgaccgagatcgtcacgcacctgaatcaggtggtcgagggggcgcgtatccgatgagcgagacggtggtgttcagtcagctgagccgtaaatttattgatgagaacgacgcgacgccggatcaggcgcagcaggtggtctattacagcctggcgattggccaccacctcggcgtcattgactgcctggaggcggcgttaagctgcccgtgggaggactatctggcgtggatcggtacgctggaagcgggcagcgccgcgcggcgcaaaatggaaggcgtgccgaagtatggcgagatcgttatcgacagtaatcacgtggcgatgctggctaacgcctttgataaagcgcagtccgcgcaaaccccgcagcagcaggcgtggagtaaaaccctgctcagcatgctgcacgatattcaccaggaaagcgccatctatctgatggtgaggagactacgtgactgacgttttactgtgtgtcggcaacagcatgatgggcgatgacggcgcaggcccgctgctggcggaaatgtgcgcggccaatccggtcggcggctgggtggtgattgacggcggcagcgcgccggaaaacgatatcgtcgccatccgcgagctgcgcccgacccggttgctgatcgtcgatgcgaccgatatggggctcaaccccggcgaaatccgcattgtcgacccggacgatatcgccgacatgtttatgatgaccacccacaatatgccgcttaactatcttatcgatcagttaaaagaggatgttggcgaggtgatttttgtgggcattcagcccgatatagtcggtttctattacccgatgactcagcctgtgaaagacgccgtcgcgacggtatacgcgcggcttgatggctggcaggagcagggcggttttgccgcgctggaagcggccgaggagcaggcgttccccggcttgcgctaatgcttcgccgggctataaatggtacggaccgttgatattgttatcgttttgcaaccgtttgggtccgggaaaaacacgtgttttgtgttaattcagagcacattgcgctcccgatattttttctgcgttatggctctcatggcgcagggagcgcacagagggcggccagtcgccgccgccctctgtactcccgggctctggccgccaaaatcgccacttcgtggtgccttcgacttatcccggcaggcttcgggtcgggccgaggcagcgtccgtgcaaaacacggccctcagcccgcatccatgcgggctgccccggcctgccgggaacgtctcagcgattttgaggccaccaacaccggcagtttcagccagcgtggtgaataaaataacggcaggccgtacggaccgtaggccgggtaaggcgtaagccgccacccggcaataccggctattccagatccgtcccgttgctggcgatgaccttcttataccaccagaacgatttcttacgcttgcgcgcaagcgtgccgttaccggcatcgtcgcgatcgacatacacgaaaccgtagcgcttgctcatctcgccggtggaggcggagaccaaatcgatacagccccagctggtatagccgatgaccggaatgccgtcatcgatggcgtcgcgcatcgccttgatatgctcgcgcagatagctaatgcggtagtcgtcgttgatttcgccgttggcgtcaatttcatcgcgcgcgccgagcccgttttccacgaggaatagcggtttctgatagcggtcatacatcatgttcatggtgatgcgcaggccgagcggatcaatgccccagccccattcgctggccgcaatgtacggattcttcagcgacttgacgatattggcggcgttggtattgctggcgttcatctccgctgacgcgcagcgcgaggcgtaatagctaaaggagacaaaatcaacggtgtttttgaggatttcgtcgtcgcccggctgtttggcaatagtgacgcctttctcgcggaatacccgcgcggcccacaccggataagcgccgcgtgcctgcacatcgataaagaacaggttttcacgatctttttccaacgccatccagacatcttccggcttacaggaataggggtagaaattaccgcccgccagcatgcagccgacctggttttgcgggttaacctgatgggctatttttgtcgccagcgcgctggccaccagctcgtgatgcgcggcctgatatttcacctgctcctgattttctccctcctcaaacaccagaccggcgccggagtagggactatgcagcataatgttgatttcattgaaggtgagccagtatttcaccagtccgtcaaacgcttcaaaacaggtgcgcgcatagtggctgaaaaaatcgaccatcttccggttacgccaggagccatattccgtcaccagatgcatcggtacatcaaagtggcacagggtgaccagcggttcgatcccgtactttctgcactcctcgaacatcgcacggtagaaagcgataccttccgggtttggctgttgttcatcaccgcgcggaaacaggcggctccaggcgatagaggtgcggaagacgctaaaccccatctccgccatcagggcgatatcctctttatagcgatggtaaaaatcgatcgccacgtggcttgggtagaattcattttcgcgaagcgtaaagcgcttctcctggcccagcttcaccgacaggcgatgggcgccgtgcggaatagtatcaacggtcgtcagccctttgccgccttcaagataagcgccttcagactggttggcggccagagcgccgccccataaaaatccgtgtggaaaactcgacatgcgttacctcgcgttcaaaaaagtgttcaggcgtgagtggccgcgccctggcgctgtctggcgtcggcggcggcattttctaccgggatatcttcaaaaccgagcagcagcgtcagcacaaaggagagcaccaccgacagcgccatcacgccaaagacccaaacgatagtcatcggattggccggatcgaagaactggacgctggtgaacagccccggtgccgccatcgaatggctggccagcccggcgattcccgccaccgcgccgcaaataaagccgctgattaagctggcgaccagcgggcgtttcagacgtaccgccacgccgtacagcgccggttcggaaatcccggccagaatcgccgatgccgccgccgctaatgcggtctggcgtagctccgggtttttggttttccacgccaccgccagcgacgatccgcccagcgacaggttggcgccgatttccgatggcatcaccatgccctctttgccggtttcagcgatggtttgaatgatggttggcgtaaagacgcggtgcatcccggtcatcaccagcagcggccagagtccgcccatgatcgccaccgacagccagccgagatagctatggatcgtgtacaccagcgcggagatcgcgctgccgatccagataccgagcgggccaatcagcaggatcgccagcggcgcggcaatcagcacgatcagcatcggtttaaggaagtttttcgtcaccgccggggtgatgcgatcgacccagcgttcgatataagagagacaccaggtcatcaccagcgccgggatcaccgtgtaggtgtatttcaccgcggtaaccggaatgaaggcgaactcaacgtgttctccctgcgcggctttggccattaattcgatgaatcccggatgcaccagcaccccggcgatagcgatagccagcgacatattggttttgaattttaccgccgcggaagcggcaaccatcagcggcaggaagaagaacgcgccgtcgccgattagcgtcagaatggtcagcgtcggagagccttttggcaacgcgccgctcatctccaggatcatcgccagcagtttgaccatcgatccgccgataatcgccgggatcagcggcgacatggtgccgatcagcgcatcaaggatcccggtgccgatgcgttttaaggtcagcggcggtttcccctgcggttcagccgggcgcaactcgccgggcaactgattcagcacctcgcgatatgcctgcgagacggtattgccgatgatcacctggcactggttatcgctacgcacgacgccaagtaccccttgcagcgctttcagcgccggggcgtccacgcgttggttatctttcaccacgaagcgcaggcgggtcatgcagtgggtcacggcaacgacattatctgcgccgccgagcgccgtcaggatctggttcgccagggctgcataatttttagacatcggattttatcctgttttatcaatagggtactgattacacgccagcgcctgacggcggctatgcgcggtatatgcataggaaaccggttccacaaaatcatgatgagtttcattgagtcatacaagaattaaaaaaatcactttgcaaatttgtgattttgatcgctttgtaggcagcggctggaaagcatcccggtgatgtcggctgctgaaaaacggcgagacgtgcagtacactgcaggcaacttaagttacaggaagaaccccatggcaacgatgctggaggttgcgaagcgcgcgggagtatcaaaggcgaccgtgtcgcgagtgctgtcgggcaacggctatgtcagccaggaaaccaaagaccgggtgtttcaggcaattgccgaaagcggttatcggccgaatctgctggcgcgtaatctggcgaccaaaaaaagccagactatcggactggtggtaaccaacaccctttatcacggcgtttatttcagcgagctgctgtttcacgtggcgcggctgacggaagatcaggggcggcaactgatccttgccgatggcaaacacagcgcgcaagaggagcgcgaagcgattcagtatctgctcgatatgcgctgtgatgcgatcatcatctatccgcgctttcttagcgtcgatgagatggatgagataatcgacaatcatgagcagccgattgtggtgctgaaccgtcgcctgcgccgccacgccagccactgcgtatggtccgatcacaaagcctcggcgcggatggcggttgaaaagttaattgccagcgggcatcgcgacattgcgtttatcaccggttcgctggattctcctaccggggttgagcgtctctctggttataaagacgcgctggcaggactggggcttcccgtgcggcaagaactgatcgttgaagggcgctggacgccacaaaccggagccgccgctgtcgaagcactctgccaacgcggcgtcagtttcagcgcgctggtcgccagtaatgacgacatggcgatcggcgcgattaagcaactgcaccagcaggggattgcagtgccgcagcaggtatcggtgatcggtttcgatgacatcgcgctggcgccgtatgtgatcccttcgctctccagcgttaaaattccggtcaccgaaatgatgaaagagagcatcaacaggctgatctttatgctcgacggcggcgaatttaaatatcagcaaactttccccggcgagctgattgaacgcgagtcgttggcgcgcggcccgcatgcctgatgtcgtcatctgtcatcgtcagttgtgacgatgacagcggagtttaatttaattctcttatatttcaataaaataaaagttggaacgtattatgcataatccggcgcgttaacttctttccgctggagaaatggatgaaccgtttcattatcgccgatgcgagcaaatgcatcggctgccgcacctgtgaagtggcctgcgtggtctctcatcaggaaaatcaggattgcgccgcgctgacgccgcagtcgttcttgccgcgtattcacgtgatcaaaggcgtcaatgtgtcgacggcgacggcctgtcgtcaatgtgaagacgcgccatgcgccaacgtctgcccgaacggcgccatcagccgcgataaaggctttgtccacgtgatgcaggagcgctgcatcggctgtaaaacctgcgttgttgcctgcccgtatggggcgatggaagtggtggtgcgtccggtcgttcgccacagcggcgccgggttgaacgtcatggcggaaaaagccgaagccaacaagtgcgacctgtgccaccagcgcgatagcggtccggcctgcattgaagcctgcccgacccacgcgctggtttgcgtcgaccgcaacaagcttgagcagatgaacctcgaaaaacgtcgccgtacggcgctggcctggtaatacgccgcatgaacggggtgcaaatccgcattcgcggcaaagtgcagggggtgggtttccgccccttcgtctggcaactggcgcggcaaatggcgcgcggcggcgatgtctgtaacgacggcgacggcgtgctggtcaggctgatcggcgacgatggtggcttttctgccgcgttggctcgtcactgcccgccgctggcgcgtattgacagcaccgactgcaccccgtttcactggcacaggcttcctcaggatttcaccattcgccacagcggcggcggcagtatgcgcacgcagattgttcccgatgccgcaacctgcccggcgtgcctggcggagatgaacgatccgcaagaacgccgctaccgctacccctttatcaactgtacccactgcgggccgcgtttcaccatcattcgcgccatgccatacgatcgtccctataccgcgatggcgccgttcccgctgtgtccgcgctgcgctgccgagtatcggcagcctgccgatcgccgttttcacgcccagccggtggcttgtgccgattgcggcccacagctggagtggcgggcgggaacgctaacgctattcgctgaagcggcgctgcaggcggccatcgcgcggctggcggcgggcgatattgtggcgataaaagggattggcggttttcatctggcctgcgatgccggcaatagcgtggcggtggcagcgctgcgcgggcgtaaacggcgcccggcaaaaccgctggcggtaatgctgccgacggcaacggggttacccgccgcggcggcaacgctgctgcgctcgcccgccgcgccgattgtattgctggctaaagcgcaggttcccggactgtgtgacgagattgcgccagggcttgcggaagttggggtgatgctgccgtctaatccgctgcagcatttacttctgcaggcgctggcgcgcccgattgtgatgacctccggcaacctcagcggccgccctccggcgttgagtaatcgcgaagcgctcaccgacttagccgctatcgccgacggttttctgctacataatcgcgatatcgtgcagcgtatggacgattcgctggtgcgctcaagcggtgagatgctgcgccgcgcccgtggctatgtgccggatgcgctgccgctgccgccgggcctggataatattccgccgttgctggcgctaggggcggatatgaaaaataccttctgtctggcgcgcggcggcgaagcggtgctgagccagcattttggcgatctcggcgaggagggcgtcgagcaacagtggcgcagagcgctgcagttaatgcagagcatttatgcatttgcgccgcagcgggtggcggttgacgcccatcccggctatcgctcgacacagtgggcagcgtcaatgtcgttaccggtcgagccggtactgcatcaccatgcccacgcggcggcttgcctggcggaacaccgctggccgctcgacggcggcgatgtgattgccctgaccctcgatggcattggcatgggggaaaacggcgcgctgtggggcggcgaatgcctgcggatgaactaccgcgaatgcgaacatcttggcggcctcccggccgtcgcgctgccgggcggcgatctcgcggcgcgccagccgtggcgaaatttgttggcccagtgcctggcatttattcccgactggcagtcatacccgcaaaccgccgcgctggggcagcgaaactggccgctgttggcgcaggccatcgaacgcggcattaattcgccgcgcgcctcttcctgcggacggctgtttgatgccgtcgcctgcgcgctggattgcgcgccggaaaccctgagctacgaaggcgaggctgcctgtcggctggaggcgctggccgccagttgtccgggcgtcagccatccggtcacgctgccctggcgcggcggcgaactggatttagccaccttctggcaacagtggttgcgctggcaggcgacgcccgagcagaaagcctgggcctttcatgatgcgctggcctgcgggctggcagcgctggcgcgcgaccgcgccgcttcccgcgggatcgcgacgatcgtttgtagcggcggcgtgttgcataatcagctgctcgccgcccggctcagcgattacctctctgactttactttgcttttgccgcagcagcttcctgctggcgatggcgcgatcgcctacggtcaggcggtggtggccgctgcccgctggcagtctcaaaggatttaagatgataacgatgattttacgccaacagccgcgtgcggcggcgctggtactggggcttatcgccgcgaacgccctggcctggctatgggcgtttcaggcgtttggcgacagcggggcattgatggccgccagtctgctggcctggggttacggcctgcgccatgcggtcgacgccgaccatattgcggcgattgataacgtcacccgcaagatgatgcagcaggggcggcggccgtttggcgtcggggcatggttctcgctagggcattcgtcgatcgtggtgctggcgtcggcggcgatcgccgcgacggccaccgccttcagccagcagatgagctggctacacgaaaccggtagcgtgattggcactgcggtatcggcgctgtttctgctggcaatggcgctggtcaatctggtgattttgcgcagcgtatggcgcagcttccaggcgtggaagcgcggtgaaaaggtcagcgacgaaatcgtcagtggcggcggcatgatgagctggctgtttggcaagaccttccggctgataagccgcagctggcagatgtatctggtgggctttttgttcggtctcggctttgataccgccaccgaaatcggcgtgctgggtatttccgccgccggcgcgtcgagcggcatttcgatttggtcgataatggtcttcccggcgctgttcgccagcggcatggcgctggtggatacgcttgataatgtgctgatggtcggcgcctacggttgggcgttcagcaagccgcagcgcaagctctattacaatatgatcatcaccgctacctcggtggtggtggcgctgtttatcggcggcctggaggcgctggggctgttaatggataagttcgccctaagcggcggggtgtggcgctgggtaggggcgttaaacgataacctcggcgatgccgggtttgtggtggtggggctgttcgtcgtttgttgggcgctgtcggttcttaattatcgctggcgcggctacgataatctggcgcgctagcctggctattttcccggcttgcgctgcgcttagccgggctacctggacaataccgtagcccggctaaggcgtttacgccgcaagccgggaaaaccatcacctcaccagttgcttgagcagcgcaaaggcttccttcattttgtcttcactcaccacaaaggcccgcagctggttttcggcatccacgcctttcgccaccagcccctctttggcggccacgatattccacgtcagatcgtcgcggcgggtgtcgccggccagatgcagcggcagatccggcgttttcactttcaccagcattggcggcaatgtgagctcgcccgtttgcgccagcaggtttttactcaggcacatggcgctgagtaaaatcggctgcaggaacggcagtaccgtaccgttgatttccgcacagtcgccgagcgcataaatcgccgggtcgctggtttgcagttgattattgaccaccacgccgcggttaatctgcaatccggcatggcgcgccagcgacgtttccgggcgcaggccggcggcggccaccaccgcatcgacggttatcacgcgctggcgatcgagactgacgcgaatgccatcggcggtttgctctaacccctcaagcggcgccttgagcatcagatgtacgcccatctcggtaagccgatgctgcaggcggctgctggcctccggcggcatcagcgccgccagcacgctggctgaattgtcgactaccgttaccgctttaccggcgcggcagaaatccatcgccagttcacagccaatcaggccgccgccgacgatcagcacgcgcttcgcgtcgtgcagctggctctgcgccgcgccatattcgcgctggctgttcagcgtcagcatcagctcgcgtcccggcaccggcgggataaacggcgtcgcgccggtggccagcaccagtttgtcgtagcgccactggttatcctggctcttcactaaccggttttcggcgtcgatatcgcttacccaggtatggggaaacagacgcagattgtactgctcggcgaactcgccggcgctttgcagggtcagatcgtcggccttctgcccgcggctgatgacatggctgaggtccggtttgttgtactcatccatgctatcggcggcgattaacgtcagcgggatttgcgtatcttgcttacggatatttttcaccagctggcgggccgcgaagcccgagccgatgatgacaatgccatcactcattttgcctccgtcgccagtacgtcaaagacatctttgccaagagaacactcagggcagaggaaattgtccggcacttcactccacggcgtacccggctgtacatcctggttaggttcgcctttcgccgggtcatagacccactggcacacgctgcactgcatcatgggaccgaggtcagcggccgcggcggcggcgcagacgcaatcctgtggttccggcgttgtcgctgcttcagcaaccggcagcggagagagggcccactggcgggcgatgtcgcgtccgtgttggcggcacagttccagcgcgtcgatatccgggcgccatttggctttcaggctcagcgacatctcaaaaccggcatcctgcaggcgggtggacagacggtctaccgcgccgccgctccagccgtgtgagccaaaggcgctggcgcgtttattgcgaaaacgcaacccggtcatctcttccaccagcccggcgattttcggcatcatcacgttgttcatggtggaggtgcccaccagcacgcctttcgagcggaaaacattggtgagaatgtcgtttttgtcgctgcgggcgacgttgaagatttttaccgctacccgcgggtcgacttcagtgatcccctgagcgatggcgtccgccatcatgcgggtgttattggacatggtgtcgtagaagagggtgatacgatcttcctggtaatccgccgcccactcgaggtatttctcgacgatttgcgtcgggttatcgcgccagaccacgccgtgggaggtggcaatcatatccaccggcaggttgaagccgaggatttcggtaattttcggcgtcaccaggcggctgaagggcgtcaggatgttggcgtagtagcgctggcactgttcgtacagttcaatctggtccacttcatcgttgaacaggtgttcgtcgcagtagtgctggccgaaggcgtcgttgctgaacagcaccgcgtcgccggtcaggtaggtcatcatgctgtcaggccagtgcagcatcggcgtttccacgaagatcagctgtttatcattaccgatatagagagtatcgccggttttcaccacgtggaagttccactccggatgatgatggtggccgttgatcgagtcgatggcgttggcggtgcagtaaatcggcgtatccgggatctgcatcatcagttcggtcagcgcgccggcatggtcctcttcggcgtggttaatgacgatatagtcgaggtcagccagatcgatttcgctgcgcaggttctgcacgaactcgcggctgaatttatgatcgacggtatcaatcagcacgtttttctcttcgcggatgagatagctgttgtagctgctgccgcgcagcgttttatattcggtaccgtggaaatcacgcacttcccaatcgcgttggccaacccaaagaatgttatttttaaccgcaatagacatagcaacctcaatcaatacagtgtgtttaaactcagttgattggcttatatcaagttgcgtgccaactttttaattcattgataattagctatttttaattttttctgattttggttgctgtcaaaatgacaatgattaaaatagtcgttatgacaatgtgtattgtcacaatgacaatggagcggcaatgagtttttccgtcgacgagttggcgagaatcgccattgatttacaaagcgatatcggtcatgccgaccgtttttcgcgcctgattactaccctgcggcagatcctcggctgcgatgcctcagcgctgctgcgctatgaggcgcatcagtttgtgccgctggcgatcgatggcctggcgcaggatgtgcttggtcggcgctttgccctggaaggacacccgcggcttgaggcgattgcgcgcgccggggatgtggtgcgcttcccggcggatagcgatttgcccgacccctatgacgggctgatccccggtcatgagagcctgaaggttcacgcctgcgttggcctgccgctgtttgccggacagacgctgattggcgcgctgacccttgatggtatggatgccgatcgtttcgatagtttcagcgatgaagagctgcgattgattgccgcgctggtggctggcgccttgaataacgcgctgctcatcgcccgccttgaggcgcaaaatgtgttgccggtgcaaccggtgaatgacgcgcagcctgagcgtcaggagattatcggcctgtcggcacccatgctgcagctgaaaaaagagatcgatatcgtcgccgcctcggatttaaacgtgctgataagcggcgaaaccggcaccggtaaagagctggtggcgaaggcggtgcaccagggatcgccgcgagccgccaatccgctggtctatctcaactgcgcggcgctgccggaaagcgtggcggagagcgagctgttcggccatgtgaaaggggcatttaccggggctatcagcaaccgcagcggtaaatttgaaatggctgataacggcaccctgttccttgatgaaatcggcgaactgtcgctggcgttgcaggcgaagctgctgcgcgtgttgcagtatggcgatattcagcgcgtcggcgatgaccgcagcctgcgggtcgatgtgcgggtgctggcggcgactaaccgcgatctgcgccaggaggtggtggaagggcgctttcgcgccgacctgtaccatcggctgagcgtcttcccgctgtcggttccggcgctacgcgaacgggagaacgatgtggtgctgctggcgggctatttctgtgagcagtgccgcctgcggatggggctggcgcgggtcattttggctgaggcggcgcgaaacaggctgcagcagtggtcctggccgggcaacgtgcgcgaactggagcatgctattcaccgcgcggtggtgctggcgcgggccacccaggccggtgatgaagtggtactggagccgcagcatttccagtttgcggtgacggcgccgatgttgccgactgagacggcggcagcggcgccggcgacggaaaacgtcaatttgcgcgaggcgactgactcttttcagcgagaagcgattagccgcgccctggaggcgaaccagcgcaactgggcggcgaccgcccgtgcgctggaactggacgtcgccaacctgcatcggctggcgaaacgtctgggacttaaaggatccctgcctggtaaaagttctgcaggttgatggcgccgaccagttggccgttttcatccacgaccggcgcggcgctgattttgtgtttcatcagccgctctttggcttccaccgcgcggctttccgcctgcagcgttacgccgttgcgggtcatcgcccgagtgacgctatcgttgagcgtaccgccagcaaccagccagcggcgcaggtcgccgtcggtgaaaacgccctgcacgcggttggcttcatcgcagaccgccaccaggccgagcccggttcggcttagttcaagcatggcgtccatgacgttggcctcggcattgacccgcggcacttcttcgtcgcggcgcatcaggtgatgcactttgttcagcagacgcgcgccgagggcgcccgccgggtgggaacgggcgaaatcttcttcattgaaaccgcgcgcctgcatcaccgccatcgccagcgcgtcgcccagcatcagcgtgttgacggtgctggaggtcggcgccagatgcatcgggcaggcttcgcgctccacggcgatatccagcaccgctttcgccgccagcgccagcggcgaggtggatttgccggtcatcgccagcagcggaatggatttctcttccagccgcggcacgatgagatccagctctttcgcgctaccggagtaggagataaacagcatcacgtcgcggctatcgagcataccgagatcgccgtgcagggcttccgccggatggacgaaaaaggccggggtgccggtgctggcgaaggttgccgccagctttttaccgatgtggccggatttaccgataccggagacaatcagtttgccctcgcagtggataatggtttccgccgcgcggatgaagtcgtcgcccaggcgttccggcaggcggctcgcctcctgcagctcaagcatcagggtctggcgtccggcctctaacaaaaagttactcatgatgttctccagtaataatgacttcaatacctttggcttccagcgcccgctggaattcagggtcaatatcggcatcggtaatcaatttatccacgcgttcaaggccgcagacaatgttgggacttttacggccaaacttggatgagtcggccatcaggatcacttcgcgggcggcgttacacatcgccttacttacggtatagacctcgttaaaggtggtgacgcccgcgaccagatcaatgccgtcggtgcccataaacagcttgtcgaagctgaattgttcgaaggcgttttccgccagttggccgtgaaaagaggccgattttttacggaaggtgccgcccggcatcaggatggtctgctcgttatcgagctcggaaagcgcgttgacgatatgcaggctgttggtcatcaccgtgatgttattgaagcggctcagcagcggcaccatctgcagcacggtgctgccggcgtcgaggataagtgaatcgccatcgtggatgtatcgcacggcggcctcggcaatctgcgctttcttgtgggtgttgatcagcgtcttgtggtcgataggcgggtcggcctcgtctttatttaacactacgccgccgtaggtgcggatgacggtcccggcattctccagtatcaccagatccttgcggattgtggtgccggtggtgtcgaagtgttgcgccagctcttcgaccgagcatttgccctgcgattgcaggtactcgagaatggctgcctggcgctgacgtggtttcataggcgttgtatcctgcgtttaagtttcgaagtgataatttcgcaagatattaactttcacaacgaaattatgcatgtttcggattaagcgctaatgatagtgcattctgacagagcggatcattgggaaagatcacatcaggctgcaattcctcgagatgtttaccgctaagcgtggggattttttgcgggctggcgaagacggtgagtcccttcattaacagcgtatcgcaaatacgatcgttttcatcgacggcgatagcgacaatcgcgcgcggtttaaagcgcccggaggagcggccgacgccgacgcggccctgctggcaaaggcgatcaaaggcgcgattgaagcggcggatctgccagccgccgaacgccagttggcaaagccaggcaatagcggcgacggtaatgagtgcggtaaccataatgtctcctgaaggtgtgatgccgggtacaacccgggtaccgttttttgtcgggtggcggctgacgccttacccgacctacagttttgtaacccggataagcgcagcgccatccgggaaccttttaaaacatcacctggccgccagtgacgttaatcgactgcccggtacagtacgatgcctgcgggctggcgtagaacatcaacacgttcagcacatcctggtaatcgcagccgcgtttcaacggcaccttatcgatgtagtactgctcgacttcgctctcatcaatgccgagcttggtggcgtactgcggcagcagcgactggaacatcggtgatttcaacagattgccgagcatcagcgaatgcacggtaatgccgtattccgccagatccagcgccagcgactgggtcagcccgacgccgccgaacttcgccgcgctatagcctgagttatgcttactgccgactttgccggatttcgagttgatctgaatgatgcgacctttgatgccatcgcggatcatcagccgtgagaactcgcgggcgcagaggaaatagcccaccaggttgacctgcagtgagcggtcaaaatcgcccagcgcgaagtcgctaataaaggcggccttagcgataccggcgctgtagaccaggagatcgacgcgcgtgaaaatctcatccacgccgtgagccagcgccgtgacgctggcttcgctggtggcgtcggcgccgaagccgtatgccgtaccttcgccatattcagcgttgatctcctgggcgacgcggctggctttttcactttggatatcgaccaccgccacgcggtagccctcggcggctagaccgcggcacagaaactctcctaaggtttgtccgccaccaatgacaacagcaacctgattcatctttctctccttctaagcaacaaatttcagtacacagccggtcgcgatggcgtccggtaccgggcccgcgacgtgaacggttccgggaaactccgcctgacgatggccgtcaaagcgcagggtgatgtggcccagctcgcgcaggttttgctcggcgacctcgccgacggcggtcaccggataatgccgatcgccgagctgtagctctgcgcccggtaccaaagggccggcaagctcgccgtggttgtgaataaagcaatactcttcgatatccgccggtgcgccctcgcggaaggtaataagcatctgttcttccagcgccgtcgccgcgctggcgccgatacgggtaatagtggtgtggtaaatgacggtcatcttcaggaacctcttattggtaaataaatccggaaacgaaccacgcgatcagcacggttggcgcgccggtgaggaagcggctgaccagcaccgacggcacgccgacgcgtacggtatcctgacgggcttcggccagcgacaggcctaccgggataaaatcgcaggcggcctgggcattaatggcaaacagcgcgggtagggcgagatgcggtggaatgttgccaaggccgatctggacgccaatcagcacgccgatcacctgggctatcaccgcaccggggccgagaaacggcgataacaacgggaaggagcagatcagcgccagcgtcaccagccccagcggatggctggcgagcggcgccaggccgtgggcaatccagtcgccgatgccggaggccatgatgatgccgatcagcgccgagacgaaggccataaacggcagaatggttttcagcaccgtatcaatggtgtcacgcccggcctggaacagtaccgcaaccaccgatcccatccccatcccgaccttagccagcaggccgtcgctctgttcggtaatcttcttgctggcatcgtaatcgcggcccgcggcggggagtgggtgcactgccgtctcgccgctatcttccagcagtttgatgttctcttctttgactccggagacgtaaatatcttcgacgatatactgcgccagcggcccggatttaccggtggcgtggatgttgatggtcggaatacggcgcttcgggtagaggccgcaacgcagggtgccgccgcagtcaataatggcgaggccaatttcgctttccgccggttcaccttctttaaatccatcaaccgcctgccagccggtcaggctggcgagcgtatcgacgatcgccgggcgggtgcctgcggtgatatagacaatctttttgtcctcaacaacgtcgagttcaagcgggccgccccaaccgccggtccctttttcaatacgaatacggctcatgatgtcgctcctgacagacgcactttctggtcaagttgaatcgccatttttctctcgaaaatagaggtggtcaggtcggtgacccagccgcggaagaagttggttaccaggccaaccagcaggtagctcaccgccagcgggccaagcggcaggcctagcgtggtgaggccgttggcgatgccgagataaacaaacagctcgccggggttgatgtgcggaaacagcccgttcatcgaatgacagctataggaggccgccgcgtagtagctcggtttgtatttctccggcataaagcggccaaggcttaaggtcatgggattgcagaagacaaaggtgccgatgcagggcagcagcaggtaacgggtaagcgggttgccggcgcagcgctgcgccagcttttcgatccgctgctggccgataaagttgatcagcgcgttcatgatcaccagcaggcttatcagcagcggcaggataccggtcaccataccggtaaacacctcgccgcctttctgaaacaggccgatgaaccactcagcgccgtgggtaacgatttcaatcattgttctctccttcagcgtgttatttttcttgctaactggaggctgattttaatcactttgaaaggtttaaaagtgttaaattgatcgcaaaatgaaagataaatattttattttgaaagtttgtgcgcgatgagtgaaaaaattaacgtgcggatcgaatgcggagaacgtgcaaaaaaagaactattttgtctgcaaatgtattgccgcttccttgttggcgggcgcatgctttaccataattaccctttgccgattttgttaaatggaattcccatgttgaagcgtcgctatctggctttactccctttatgtgcacttctggctgcctgcagcagcaaacctaagacccccgcggaagcggagatggcgagcggaaccggcggctttttgctggaaccgcagcataacgtgatgcagatgggcggcgatttcgccaataacccagcggcggcgcagttcatcgataagatggtggcgaagcacggcttcgatagacagcagctccaggagatcctgtcgcaggctaagcgcctggactacgtgctgcgactgatggagcgccaggcgccgagcgggctgccgccgaccgggccaaacggcgcctggttacgctataagaaacagtttattacgccggataacgtgcagaacggcgtggtgttctggaaccagtatcaggacgcgctgaaccgcgcgtatcaggtctacggcgtaccgccggaaatcatcgtcggcattatcggcgtggaaacccgttggggccgggtgatgggcaaaacccgcatccttgatgcgctggcgacgctgtcgtttaactatccgcgccgcgctgaatacttctcctctgagctggaaaccttcctgctgatggcgcgcagcgaaagcgatgacccgctggatctgaaaggctcctttgccggcgcgatgggctacggccagtttatgccgtcgtcgtataagcaatacgcggtggacttcaacggcgacggtcatatcaacctgtgggatccggttgatgccatcggtagcgtggcgaactactttaaacagcacggttgggtgagcggcgataccgtcgcggtgcaggcgctgggccaggcgccgggtctggataacggctttaaaaccaaatacagcgtttcacagctgtcggcggcgggattaaccccaacgcagccgcttggcaaccatcagcaggccagtctgctgcggctggatatcggcaccgggtaccagtactggtatggtctgccgaacttctacactatcacccgatataaccacagcacccactacgcgatggctgtctggcagctggggctggcggtttcgcaggcccgcggcggttattgatcctttcatccagccgacatatttcgagttccccggatggcggcgcgtagcgccttatccgggctacggtctggtatccggttggtagccccgggacgccgcgcttatccatccgttttttcccttctgcatgccttttgttgacctttgttacatttcctctcgctgacgcagatttacattcttttctgaatcccatattgttatgttataacattttattggggcggggatatgttcacatcggtttttatggcatccggcgcggcgcgcgtggcaatcgcctgcggactgctggcggcgctatggctggccacatggtgggcggtggcgctgccatgattgagttggatcatctggttgccgggtatgaaggcatggcaatcatccggcgatgagcggcgtgattgcggcgggaagcctgacggcgattgtcgggcttaatggctgcggtaaatcgacgctgctgaaaacgctggctggatttattccgccggttagcggccggcttaactggcgcaaagggcggcccgtggtcggctggctggcgcagcgccatgccctggaatcacagtttccgctgctggtgcgcgatgtcgtcagtcagggggcctggccgcgggtctcgctgctgcgcggtctgggcggcgacgagcgtcggcgcatcgccgcggcgctcgagcgggtggggctcagcgcgctggccaatacgccaattgaagagctctcgggcggccagttccagcgcatgctctttgccagggtgatggtgcaacaggcgccgctggtgatgttggacgagccgtttaccggcgtcgatgaggccaccagccgcgagctgatggcgcttatcgtcgatatgcaccgccaggggcaaacgatactggcggtgctgcacgataaccagtgcgtggccgatttctttcccgagacgctgctgcttgaaccccagcacgcgcgctggggcgagacgtcaagtgtgcttcccgccttcaacaccgcgaggcaggcatgatctggcataccttttttcaaccttttattgaatttggctttatgcgccgggcgctggtggtgtgcttcgcgctgtcgctgagcaccaccatgttaggcgtgctattgctgctgcgacggatgagcctgatgggcgatgcgctgtcgcacgccattctgccgggagtggcggcgggttatctccttaacggcatgtcgctgctggcgatgagcgttggcggatttatcgccgggatcgcggtggcgctggtggcggggtgggtcagccggcgaacgccgctgaaagaggacgccagttttgccgggttttacctcggctcgctggcccttggcgtcacgctggtctcgctgcgcggctccagcgtcgatctgctgcacctgctgttcggttcgattctggcggtggatagcgacgcggcgttctttgtcaccggcgtggcgagcctgacgctgctgtgcattgcgctgttttatcgcgggctggtcagcgaggcgttcgatagcgcctggctacaggtcaacgcgcggcggctaccggcgctgctgcacggcctgtttctcgcgctattggtactgaacctggtggcggggtttcaggtgctcggcacgttaatggcggtagggctgatgatgttgcccgcggtagcggcgcgctgctgggcgcgaacgctgccgggcattttgttgctggcggcggcgatcggcgcgttttgcgcctggatgggattgagcctttcgtgggcagtgaatttacccgccgggcccgccatcgtgctgaccgccagcgtactgttttttatttcagtgttttttggcacgcgcagccggctggtcgttggctggcgcaaattaatggggtaaggaaatgatgaaacgaagtgcagtggtgatggcgttagccgtggggctgatggcgcagggggcgatagcaaaaacgctgaacgtggtaagcagcttttcggtgctgggcgatatggtgcagcaggtcggcggcgagcatgttcatgtcgatacgctggtagggccggatggcgatccgcacacctttgaaccttcaccgaaggatagcgcgctgctcagcaaagccgacgtggtggtggtcaacgggcttggtctggaagggtggctggatcggctggtgaaagcgtccggttttaagggcgaattagtggtggcgtcaaaaggggttaagacgcataccctcgatgaagacggtaaaacggtgaccgatccgcacgcctggaatagcgccgctaatggcgcgttgtacgcgcagaatatccttgatggcctggtgaaagccgacccgcaggataaagcggcgctccagagccgcggtaagcgttatatcgagcagctgacggcaattgacggctgggcgaaggcgcagtttagcgccatcccacaggcgaagcgtaaagtgctgaccagccatgatgctttcggctattttggccgcgcttaccacgtgacgttccttgcgccgcagggactctcatccgagagcgaagctagcgcggcgcaggtggcggcgttgattaagcaaatcaaagccgatggcgtgcatacctggtttatggagaaccagctggacccgcgtctggtgcagcaaatcgctggcgcgacgggggcgcaaccgggcggcgaactctatccggaagcgctgtctaagccgggcggcgtggccgatagctacgttaaaatgctgcgccataacgtcgagctcatcgtcaatagtatgaagtagcgggttgtctggtcgtcctggttgcagcgggacggcccatttttggatcccccctcgtaaaatcaccagctcgtccccatatctctgccgaaagtgctatctttgatggcctctttatctggcttaagcggggcgaaaatgaccgattcagaattaatgcagctaagcgaacaggttgggctggcgctgaaagcgcagggcgcgacggtgaccaccgcggagtcctgcaccggcggctggatagccaaagcgctgaccgatattgccggtagctcagcgtggtttgagcgcggtttcgtgacctatagcaacgaagccaaatcgcagatgattggcgtgagcgaagtgacgttactggataacggcgcggtgagcgaaccggtggttgtcgagatggcaattggcgcgctacgcgcggcgcgcgccacctatgcggtatcggtcagcggtatcgccggcccggacggcggcagcgcggagaagcccgtcggcaccgtgtggttcggtgtcgcctgtgcgaacgggcagggcgtgacccgccgcgaatgctttgccggagaccgcgaagcggtgcgtcgtcaggcgacggcctatgcgttaaatctgctctggcaacaatttctacaaaatacttgatactgtatgaccatacagtataattgcctcaactgaacaaatattaacggcgaagcgaacgcgcttcacctcgcatgacaggagtaacaatggcgatcgacgaaaacaaacagaaagcgttggcggcagcactgggccagatcgaaaagcaattcggtaaaggctccatcatgcgcctgggtgaagaccgttccatggacgtggaaaccatctccaccggttcgctttctctggatatcgcgctcggcgcaggcggtctgccaatgggccgtatcgttgagatctacgggccggaatcatcgggtaaaactaccctgacgctgcaagttatcgccgcagcgcagcgtgaaggcaaaacctgcgcgttcatcgatgccgaacacgcgctggatccggtatatgcccgcaagctgggcgttgatatcgacaacctgctgtgctcccagccggataccggcgagcaggcgctggaaatctgtgacgcgctggcgcgttccggcgcggtagacgttatcgtcgtcgactccgtggcggcgctgacgccgaaggcggaaatcgaaggcgaaatcggcgactctcacatgggcctcgcggcgcgtatgatgagccaggcgatgcgtaaactggctggtaacctgaagcagtccaacacgctgctgatcttcatcaaccagatccgtatgaaaatcggcgtgatgttcggtaacccggaaaccaccaccggtggtaacgcgctgaagttctacgcttccgtgcgtctggacattcgccgcatcggcgcggtgaaagagggcgacaacgttgtcggcagcgaaacccgcgtgaaagtggtgaaaaacaaaatcgccgcgccgttcaaacaggctgaattccagatcctctacggtgaaggcatcaacttcttcggcgagctggttgacctcggcgtgaaagagaagctgattgaaaaagcgggcgcctggtatagctacaacggcgacaaaatcggtcagggtaaagcgaacgcaatctcctggctgaaagataacccggcggcggcgaaagaaattgagaagaaagttcgcgaactgctgctcaacaaccaggactccacgccggacttcgcggttgacggcaacgacgcagaagaaaccgaacaagatttctgatatcgtctaaaagagtgacaaagggctgctgatgcggcccttttgcttttcttagattatcgaggtgcctgtgactgagacttcaccacgccgctccggctatgcgcgtctgttggatcgcgcaattcgtattctggcgatgcgcgatcatagcgaacaggagctgcggcgtaagctggcggcgccggtaatgagtaaaaacggccctgaaaagctggacattacgccggaagagctcgaacaggttgtcggctggtgcctggaaaaccgctatcttgatgaccagcgttttgttcgccagtttattgccagccggagccgcaagggctatgggccggcacgtatccgccaggagttgaatcaaaagggcattggccgcagcgacatcgaaagcgcgatgcgcgagtgtgaaatcgactgggcggcgctggcgaaagagcaggcgcagcgtaaatacggcgaaccgttaccttccgcttttactgaaaaagttaaaatccagcgatttttgctgtaccgcggctatctgatggaagatatccaggaaatctggcgaaattttgcagattgacccatcggggattttacttccctctaaagaaaacttatcttattcccactttattccgtcgggccgctgcttgtgattgcataatcagcgtccagggcgattattccttatacacaaaatcattcaagctgcatcacggcggcaagagagaacagcttctggggcgtacgtgagttcactaccgggagaggacgttccgccaggtcagaggcgacttgaaggatgaagtgtagcttgatttcaggataattatgagcaagagcaccgctgagatccgtcaggcgtttctcgactttttccatagtaagggacatcaggtagttgccagcagctccctggtgccgcacaacgatccgaccctgctgtttaccaacgccgggatgaaccagttcaaggatgtcttccttggtctcgacaaacgtaattattcgcgcgcgaccaccgcgcagcgttgcgtgcgtgcgggcggtaaacacaacgatctggaaaacgtcggttacaccgcgcgtcaccacacctttttcgaaatgctgggcaacttcagcttcggcgattacttcaagcaggatgccatcaaatacgcatgggaactgctgaccggtgagaactggttcgccctgccgaaagaaaaactgtgggttaccgtttacgagaccgatgacgaagctttcgacatctgggccaatgaagtgggcgttccgcgcgagcgtattatccgcatcggcgacaacaaaggcgcgccgtttgcttctgataacttctggcagatgggcgataccggtccgtgcggcccatgcaccgaaatcttctttgaccatggcgaccacatctggggcggccctccgggaagcccggaagaagatggtgaccgttacattgagatctggaacatcgtcttcatgcagttcaaccgtcaggctgacggtaccatggagccgctgccgaagccttccgttgataccggtatggggctggagcgtattgccgctgtactgcagcacgttaattccaactatgacatcgacctgttccgcaacctgattgcgagcgtggcgaaagtcaccggcgcgaccgatctgactaacaagtcgctgcgcgttattgccgatcacattcgttcctgcgcattcctgattgctgatggcgtgatcccgtcgaatgaaaaccgcggctacgtgctgcgtcgcatcattcgccgcgcgattcgccacggcaacatgctgggcgcgaaagataccttcttctggaaactggttgctccgcttatcgacgtgatgggcgccgccggtgaagagctgaaacagcagcaggctctggttgagcaggtgctgaaaaccgaagaagagcagtttgcgcgcacactggagcgtggactggcgctgctggatgaggaactgtcgaagcttaaaggcgacacgctggacggcgaaaccgccttccgtctgtatgacacctatggtttcccggttgacctgactgcggatgtctgccgcgagcgcaacatcaaggttgacgaagcaggctttgaagctgcgatggaagagcagcgccgccgcgcacgtgagtccagcggtttcggcgctgactataacgcgatgattcgcgttgacggcgcatcggaatttaaaggctacgatcatctggagctgaacggcaaagttactgcgctgttcatcgacggcaaagcggttgatagcgtcagcgcgggtcaggatgcggttgtagtccttgaccagacgccgttctatgcggaatccggcggtcaggtaggcgataaaggcgaactgaaaggcgctggcttctccttcgcggtcagcgatacgcagaagtacggccaggctattggtcatatcggtaaagtcgccagcggttccctgaaagtgggtgacgcggtgcaggccgatgtcgatcaggctcgccgtcagcgtatccgtctcaaccactccgcgacacacctgatgcacgcggcgctgcgccaggtcctcggtacccacgtggcgcagaaaggctcactggttaacgataaagcgctgcgttttgacttctcgcattttgaagcgatgaagccggaagagattcgtgcggtagaagatctggtcaacgcgcagatccgtcgtaacctggctatcgaaaccaatatcatggatatcgatgccgctcgtgaatccggcgccatggcgctgttcggcgagaaatacgacgatcgcgttcgcgtactgcggatgggcgatttctccaccgagctgtgcggcggtactcacgcggcgcgtaccggtgatatcggcctgttccgtattacctctgaatccggtaccgccgcaggcgtgcgccgtattgaagcggtgaccggcgaaggggcgattgccagcctgcatgcgcagagcgatcagctcagtgatatcgcgcagttgctgaagggcgatagccacagcatcggcgataaagttcgcgcggcgcttgagcgtacccgtcagttggaaaaagagctgcagcagctgaaagagcaggctgcagcgcaggagagcgctaatctctccagtaaagccgaagaaattaacggcgttaagctgctggtcagcgagctggccggcgttgagccgaaaatgctgcgtaccatggttgatgatctgaaaaaccagctcggttcgacggtcgttgtattagctacggtagcggatggtaaggtttctctgattgcaggtgtgtctaaggatgtgacagaccgcgtgaaagcaggggagctggttggtatggtcgcccagcaggtgggcggtaaagggggcggtcgtccggatatggcgcaagccggtggtaccgatgcgtctgctctccctgctgcgttagccagtgtgaaaggctgggtcagcgcaaaactgtaataactataaacgcatttaccctaaataattcgagttgcaggaaggcggcgacgcagcgaatccccaggagcttactcaagtaagtgactggggtgagcgaggaaagccaacacacatgcaacttgaagtatgacgggtataggtgccgtaaccagagggttacggcaccttgcgtcataagtactgataacgataaagtcgggttgaagttgtgtagatcggctaaacttaggtttaacagaatgtgatgccgtgactgcttacaccgcgaggtgtttgtcatcgcttactttttggcgttatatgatggataatgccgggatgcgagagacccgactcttttaatctttcaaggagcaaagaatgctgattctgactcgtcgagttggtgagaccctcatgattggagatgaggtcactgtgacagttttaggggttaagggtaaccaggtacgtattggtgtcaacgcccctaaagaagtctctgtacatcgtgaagaaatctaccagcgtatccaggctgaaaaatcccagcagtccagttactaagctttccgcgcctcgctttattgtgaggcgcatccctccggcggtcgtttttctcttttcttctcctgtttcttctctcgcgacatcctctcttttgtttttattcgccgtacgtcatttttcgttgtcgcttttgagtggccgtaaagggctatttcctgttgataaaatactctttttgccgtttttgcaggctaattgcgcgtgaagtgtgcaaacggaaaaagctctcgaaaaattgtttgacttataagtctcagaaagtaatatgtgcgccatcgcagcgacgaagagcagaaacaagttcttcgaagcactcgcaagaggcgtgttgtgtggtgaggtggccgagaggctgaaggcgctcccctgctaagggagtatgcggtcaaaagctgcatccggggttcgaatccccgcctcaccgccattttgcatccgtagctcagctggatagagtactcggctacgaaccgagcggtcggaggttcgaatcctcccggatgcaccatcttctctctgtaaacagaaagaagaacgctgtgaaagcagcggcccgcagtgcgaggcgtaatcgagtcactctaccgattactccatcatactcagtgtggcatgtgttagttgtgacactgacgcgtagtaaagcaagtttcccgatgcatccgtagctcagctggatagagtactcggctacgaaccgagcggtcggaggttcgaatcctcccggatgcaccatattctccttagtaacagccataccgttgttacatggtctgcgaaattttcgccagcaccagggaggataacgttgcgtaagcaacggcccgtagggcgaggcgtagacgagtcatcctcccggatgcaccattcttgcctgattctgaattattcagatgaattctgtagtaaactagttattccgatgcatccgtagctcagctggatagagtactcggctacgaaccgagcggtcggaggttcgaatcctcccggatgcaccatattctccttaataacagcgacgacgttgttttatggtctgcgaaattatcgcaagcaccagggagaataacgttgcgtaagcaacggcccgaagggcgaggcgcagccgagtaatcctcccggatgcaccatgttctcgccacgagatttgcaacagaataacctcgcagttaaatagcttttccgatgcatccgtagctcagctggatagagtactcggctacgaaccgagcggtcggaggttcgaatcctcccggatgcaccatattctcctcagtaacagcaatctcgattgttgcatggtatgcgaaattatcgcgagtaccaggaaggataacgttgcgtcagcaacggcccgtagggcgaggcgtagccgagtaatcctcccggatgcaccatcttctcttcaataaaactctccaattttcatcccatcagtacgacgcattttatctcctcgataatcaacacatttcttattggcaagtcgctctttccactataatttatccctgtagatctacctgaaccgggtgtgatgaatgcaaggagagaaatcaatgaaatggttcaaagcaatacctgccttttgcgcaacgcttctggtcgccgtatctttggcaggctgtgccggatcgtccaccaaagaaagcaccggcggttatattgacgataccgtggtaactaccaaggtaaaaagcgcgctgtttaacgaaaaagatatcaaatcctcagaaattagcgtgcagacctttaaaggccgcgtacagctgagcggtttcgtatcgtcggctgagagcgctaaacgggcggtagaggtcacccgtcgcgtgcagggcgtgcgcgtggttgagaacgacctgcgaatcaaataataccgttttcgctatcccgagttgattaaggcgcctgcaggcgcctttgctgtctctggctcccccgcgacaaaacccgccttttgcgatacagtaacgtttccttatccggtttgtgagaacacgatgtaccaacgttacgcaggactgattttcgatatggatggcaccatcctcgataccgagccgacgcatcgtaaggcatggcgtgaagtactgggccgttacggtatgcgttttgatgagcaggccgtggtcgcgctcaacggttctccaacctggcgtattgcccaggcgattatcgagctgaatcaggctgatttagatccgcatcttctggcgcaggaaaagaccgtcgccgtcaaagcgatgctgctggatagcgtacgcccgttaccgctgatagaggtggtaaaagagtggcatggccgtcgcccgatgtcggtcggtaccggtagcgaaagcgctgttgccgaagcgctgctggcgcatcttggcctgcgccactacttctccgcggtggtggctgccgatcacgtggcgcagcataagcctgcgcccgataccttcctgctgtgcgcggagcgcatgggcgtcgcaccggaaacctgcgtggtcttcgaggatgccgacttcggtctggaggcggcgaagcgcgcgggtatggatgctgtggatgtgcgtctgttgtgagcgacgcgctgtcgctcctgtcgctttttgccagcagctttttaagcgccactttactgcccggcaactcagaagtggtgctggttgctatgcttcttacgggggcaagtcaaccgtggatgctggtattaatagcaacaatcggcaatagccttggaggggtaactaacgttattctggggcgcctgtttccgctgcgcaagcaatcgcgctggcaggagagggcaaccggctggcttaaacgctatggcgcggtgacattattattgagctgggcgcctgttataggcgatttgctgtgtttactagcgggatggatgcgcatttcctggggaccagtgctcttttttttatgccttggtaaggcgttgcgttatatcgtcatagcggcggcaacccttcagggcatgacgtggtggcactaattggactgattgttcaaccattacaattatgctaattcaaacgatttcgacaggcgggaggtcaaattgatcccggatgtatcacaggcgctggcctggctggaaaaaaatccgcaggcgctgcaaggcattaaacgtgggcttgagcgtgaaacgctgcgcgttaacgccgacggcacgctggccacgaccggccatcctttagctttaggttcggcgctgacccataaatggattactactgattttgccgaagccctgttggagtttattactccagtggatggcgatgtcgatcatatgctgactttcctgcgcgatgtgcatcgcttcaccgcccgccagctcggcgacgagcggatgtggccgctgagcatgccgtgctatatcgcgccgggtcaggatattgaactggcgcaatacggcacctctaacgttggccggctgaaaacgttgtatcgcgaagggctgaaaaaccgctacggcgcgctgatgcaaaccatttctggcgtgcactataacttctcgctgccgatggctttctggcaggccaagtgcggcgtggaagatgccgaaagcggcaaagaggcgatttccgccggttatttccgctcgattcgtaactactaccgtttcggttgggtgatcccgtacctgttcggcgcgtcgccggcgatttgctcctcgttcctgcagggtaaaccgacgactctgccgtttgagaaggccggaaacggcatgtattacctgccatacgccacttctctgcgtcttagcgacctcggttataccaataagtcgcaaagcaatctcggaattacgtttaacgatctgcacgagtatgtggcaggattgaagcgggcgattaaaacgccatcggaagagtacgctaaaatcggtcttgagaaagacggcaaacatctgcagatcaacagcaatattctgcagattgaaaacgagctgtacgcgccgattcgcccgaaacgggtgacccgtagcggtgaaacgccgtccgatgcgctgctgcgcggcggcatcgagtacatcgaagtgcgttcgctggatatcaacccgttctcgccgatcggcgtggatgagcagcaggtgcgcttcctcgatctgtttatggtctggtgcgtgttggccgatgcgccggagatgagcagcagcgaactgctgtgtacccgcactaactggaaccgggtgattcttgagggccgtaaaccgggcctgacgttggggattggctgtgaaagcgcgcagttcccgctggcgcaggtgggtaaagatctgttccgtgatttacgtcgcgtggcgcaaacgctggacagcatccacggcggcgaggcctatcaacaagtgtgcgatgagctgctggcgtgctttgacgatccggaattaacgttctcagcgcgcattctgcgttctatgattgaagaagggattggcggtaccgggcgtaagctggctgatgagtatcgtacgatgctgcgcgatgaaccgctggaaattttaagcgaagaagattttatcgccgaacgtgatgcgtcggtcgcgcgacagaagaaagtggaagcggaagatagcgagccgttcgaggcacttttagcacgacacgcgtagtaaaaagcgctacaaaagaaaaaggccacatcactgtggccaaactttcatctctgattcagggatgatgatgataataaatgcgcgtctttcatatactcagactcgctgttgaacgaagagttcattttattttaaaaaaaatcactatcggaggtgaagaatgccgttgttagatagtttcacagtcgaccatacccgaatggaagcgcctgcggtgcgcgtcgcgaagaaaatgaacacgccgcacggcgatcaaatcaccgttttcgatctgcgattctgcgtaccgaaccaggaagtgatgccggagcgcggtattcatacactggagcacctgtttgctggtttcatgcgcgatcacctgaacggtaatggcgtggaaattatcgacatttctccgatgggctgccgtaccggtttctacatgagcctgattggtacgccggaagagcaacgcgtggccgatgcctggaaagcggcgatggctgacgtgctgaaagtcaaagatcagaatcagatccctgagctgaatgtctaccagtgcggaacctacaccatgcactcgctggaggaagcgcaggatatcgcccgccacatcattgagcgtgatgttcgcatcaacagcaacgatgagctggcgctgccgaaagaaaaactgcaagaactgcacatctagtgcgcatgcgtcggcccggccatcgcgtcgggccgctctccgcttatcatgtcgacaacgctctccttttccttccagcaccgcgcgctggtgccatttgcccatgattacgcccacggcgatagcgaaccgatgcattgccacgactgcgctcagttattgcatattctcagcggcgtggttcgggtggaaacgccggtcggattctgggtcgtgccgccggggcgcggcgtctggctaccggcacatacgccgcacgcgttgcgcataactggcaatgtggccgcacggacgctatttatcgatccgctggcccgtgccgatctgccctctacctgccagatcgtgcagatctcaccgctgctgcgtgagcttatcgtcgcgtcgctggcgctggaagagcgctatttccccggcacccgcgatgaacgtatctatgagctgatgctggatgaaattcgcgggatgtcggtattacctttcggtttgccggaaccgcatagcgatagcctgcgtcggttatgccagcgggtgcgcgaagcgcccggtgaaccgtggggcagccgtgaggcggcgcaagcaggcggaatgagcgagcgtacgctgaaccgccattttcaacagcagaccagcctgacgtggagcgaatgggtgcgccgggcgaagctgatggaggcgctggttcgcctggcgcaggggcagtcggtactacgggtagcgctggatctgggttacggcagtcacagcgcttttagcgccatgttccgccgggtaatggggaccgcgcccagcgactattttcgcccgttggattaatccctggcgtgaacggcattacacaacgcctgtaaagacgcgcgggcaacgtcattatcaatgccgacgccccatcgactttcgccattggcaaagacgcagcgaatataggcaacggagcggctgtcgctgcgcgccccgagggtatgctcgtggtagtccttgataacgaaatgacgttttaacagcgcgctcaggccgttggcggcggcggataacaaaccgttaccacgtccgttcaagcggcgggtttcgccattcatccgcagcgcagcctgtaacgtcagttcgccatcctgctggccgtcgctctgatagtcgagtaacgccagcgtcggctgcgccagcaggccgtaacggctgcgaaacagctgccataatgcgttatgggtcatttctttaccatggctatccgtttcttgctgaacgtactggctgaagtcctgctgcaacgcccgcggcagcttaagaccatggttctgctcaatcagccatgcgctgccgcttttacctgactggctgttaacgcggatcaccgcttcatagctgcagccgatatcctgtggatcgataggtaaatacggcatttgccagcgatctcccggtttacgggcatcaaacccttttttaatggcatcctgatgtgaacccgaaaaggcggtgtaggccagactgcctgcccatggatgacgcggatgtaccgggagctggttgcagtgctcgacgatctctaccacccgattcatctgcgtaaagcgcaactgcggatccacgccctggctatagagattcatcgccagcgtgaccagacagacgttgccggtacgctcgccattgccgaacagacagccttcaacgcgatcggcgccggccatcaccgtcagttcggcgctggcaacgccggtaccgcgatcgttatgcggatgcacgctgatacacacatcctggcggcgcgagaagtggcggcaaaaatattcaatccgatcggcgtagacgttcggcgtgttgacttcgaccgttgccgggagattaataatcattggccgttcgccacagggctgccagatttccgccaccgcttcgcagatttcaagggcgaattccggctcggtaaaacagaaggtttccggtgaatattcatattgccaacgggtgtccggctgctgctcgcaatgctgacgaataagccgggtggcgcgggtggcgagctcgatcacttcggccttttccatgccgaaaaccagctcgcgaaacagcggcgcggtggcattgtagagatggatggtcgcctgccgggcgccgcgcagcgcttcaaaggttcgtgctatgagttcttcccgcgcctgagtcagcacctgaatggtgacatcttcagggatgcgctgctcctcaatcagctggcgcacaaagttgaaatcggtttgcgaggcggaggggaaggcgacctctatttctttaaaaccgcactccagcaacagatcccagaactgcagcttacgcgcggcgtccattggttcggccagcgcctggttgccgtcgcgcaaatcggtggaaagccagcgcggcgcggtagtgatttgccgctcgggccagcgacgatcgggcagggcgataggcggataagggctgtatttttcgcaaggattggtcagcatggtgttctcctgtagtcggagctttatcctgcatgacataacccatcggcggctttagcgaaatggacagaagctagcgcgaaatggacaaggtcgcggcaataaaaaagggatccgcagatcccttttgttaatacttagtgtgcgcccccgccaccgccgccggcgctgaacggcggcctggcgaaccacaccaggcctagcagaaggataaagatccccgccgaaacccagaagatttcgttggcggagataatcaacccctggttggttatctgctgggcaatccagccggaagcctgctgctgcgtcattcccataccctgcagctgatcgtacatctgctgggcgttggggttgaacggcgtcaccgactcggtgagctgcgcatggtgcagcgcctcgcggttggtccacatggtggtggtaattgaggtaccgatggagccggcaagggttcgggtatagttcgacaagctcgacgccgccgccagccgctccggcgggaggccagagagagtgatggtggtcagcggcatgaagaaacaggccaccgcaaaaccctggataaactgcggccaggccgatgcgccgaagtccattcccggttcaaaggtccacgcgcgccagtagaagcacaccgcatacataataaagctgaaggtcaccagccgccgcatatcgagcttatgagcaaagcggccgataatcggcgacagaatgaccgggatcaccccgaccggcgccgaagccaaaccggcccaggtggcggtgtagccgtatacctcctgcaaaagctgcggcagtaatacaatggcgccgaagtagagcatataggccaggctgatacacaaacagccgatggtaaagttacgcgacttaaacagcgacaggtcgactatcgggttatcgtcggtcagctcccagacgataaggaaacttatcgccaccaccgccacgatggtcaggatgataatctcgttggaagcgaaccagtcgagctctttaccgcggtcgagcatcacctgcaggctaccgatcccgataatcagcaacgccagcccgacgccgtcgatacgccgctgttcggtgcgggtttcgcggccacgcagggtctgcagcgtcatgagaaccaccgccacgccaatcggcacgttgatgaagaagatccagccccagtggtagttatcgctgatatagccgccgagaatcgggccgcaaatcggcgcgacgatgaccgtcatcgaccacagcgccagcgcgattgagcgtttcgctggcgggtagttgctgagcagtagactctgcgatagcgggatcagcggaccggcgacgatcccctgaatcacgcggaagaaaatcagcatcgtcaggctgttcgacaccccgcaggcccaggaggcgatagcgaatgccaccgtcgaccagacgaagagtttcacttcgccgacgcgcttcgccagccagccggtaatcgggatggagatagcgttcgccaccccaaacgaggtgatgacccaggttccctgactcagcgacgagccaaggttaccggcaatggtcggaatagccacgttggcgatagtggagtccagcacctgcatgaaagtcgccagcgacagcgcaatggtcatgatgaccagttgcgcgccttcgagcggtttttgctgttgcattacgctcaccccgaattatccggcgttggcctggatgataccgtcgatcagtttatttaccggctcaaggccgatttcacgggcattactttcatagaccggcgagcttcgtacctggcttgccagcatctcgccttcgcgattgctggtgtctacttcaaccagcgtcgacaggccaatgcgcagcggatgttgcgccagctgtttagcatctatctcgatacgaaccggcagacgctggacgactttgatccagttaccggtggcgttttgcgccggcagcagggagaaggcgctgccggtacccatatccaggccgaccactttaccggtgtacttcacgtcatcgccgtagatatcgctgacgatggtcgccggctggccgatacgcatatgggcgagctgtgtctctttaaagttggcgtcaacccacaggttggtggctggaaccaccgccatcagcggggtagtggtaccgatctgcgcgccaggctgcaccgagcggcgagaaacgtagccgctaatcgggctgacgatttgcgtacgctgcagcgctagccaggcgttgcggacttcggtcgccgcctgcagcaccgccggctgctgttccagtttggtgcccaatacgattgcctgattggcgttgtactgttgaatggcgacgtcgagttcggcctgcgcgctggcgacggtgtcacgtgcgtgctgcagctcttcgcggccaatcaggttcgcggcgcccagcgggatacgacgattaaggtctgcctgcgcctgggcgagggcggtttttttgacgtcaatattcgcctgcagctgcttgctgttgatcatctgctggcgagtctggcgcacgctagccgccagctgggttttggctttttcaaacgcctgctgggcgtcggtctggtcgagggtgaccagcggatcgccttgttgcacaaagtcggtgttgtcggcccagaccttagtcacgctgccggaaacctgcgccatgatctgtacctggttccctgccacataagcgtcatcggtctcttcataatgacgcaggactaaaaaccaataaatgccgtaggctacggccacaataacaaagagcaaggtcaggagcagaagggcgcctttgcgtttccctttcttgctgcctgattgctgcggagtttggctcgccgcattttcgctcatctgattctccacaattttacattcttattatttcacatcggctgagccgacctgtttaccagaaaggccagcagaagatctgctggcctgaccgtgttccttgcaactcaaaatattgtgcggctccgtgcttagcgcagggatcccgccagcgcgccgtcttcttccatttggtcgaggcggccaagcagtttacgggtgatgtgctccagctggtctttttccgcggtgctcaaagaagaccacagctgatgtagacagttgtgctgcggaggtaatacctcgcgcaagaattgatgacctttgtcggtcagctgcaggtgcaggcagcgacgatcgttatcgctttcacgacgttcgatccagccgcgtttttccagttcgtcggcgatgcgggtggcattagtgcgtgacgaacccagcgcgcagctcagctcggaaggttgaatgctgtgattttcctgagactcaagcgttatcagcgccataaataatgtctcgttaatcccttgcgctttcagcattttgttacggttttccagcagcttaccctgcatgtgcatacagagacgggtgaggagaatctcctggaaagggaaatcttcatggcggctggcgcggaatttgagcatctgctcaatgggagtaaacgaactatccatttgggtataacctcattaattacagccgatataataactattgtgacaaataaagcaaatgaattattggtcactattaatacttaaaatctccggcgagtcgccgattttccatgccaaaccataggctaaagcgctgagttgcgtagggataataatgctgttcgccacctgtaagctcaacctgaacgcgacgaaacctacccgtgttggtagtcacggggggtgacgtcagggagcaggagtttccatattggtgacttattgataacgttggtgaaaattacgcctggaaagagttattcaccttagcagacggcgtgatggcttcacaatcgctaaaatgggaaatcagaaaatacgcatttttatgcatattcgtttcatgttggtacaggggaagacagtccccacggcgataaaacgccgcggggagagggagagattacttctgcgccgccagcgcttctttcacccagccatcgaacaactgctggtgggctttaatccaaccatcaacgtgaccgttgatgtcggcttctgaagcatggccggcatgcatcatcgcgttttcggcgttgatatcggcaattggcagcttcatcaggctaaacagcttcgccgccgccgggtttttctcggcccaggctttgttggcgacgatatgcatggtgttcaccgggaaaccgtagttgacgccgttcggcagcttggtgtcgatatctttctgttctcccggcagggaggagaacggtacctgcagccagaccacatctttacccggtttcagcacgtcgctgacccagtacggcgtccaggtgtaataaagaatcggtttgccttctttataacgggcgatggtatcggccatcatcgccgcgtagttaccctggttatggaccactttattgttcagcccataggcatcaatctgatggttgatgaccgcttcgcagccccagccgggggtacagccggtgagatcggctttgccatcgccgttggtatcaaacagtttggcgatcttaggatctttcaactggtcgatggatttaatgtggtactgctcggcggttttcttgtcgatcagatagccctgcgccgcgccggtgacgaaggttccttcacggtagaattttttatcgccgcccgccgccgcgtacatatcatcgtgcagcggttgccagttggtggcaataaaggtggcatcgccagaggcgatggaggtgtaggcgacgttatagtcgacctcgctcggcttttcgacgttatagcccagtttctccagcgcgcgactgaccagcagcgtctggaaggtttcttcggaaatagtactctgcgccggtttcacggtgatgcctttacccggcagctcggcagcaaacgcgctggtcgtgacgagggcggtaaacgctgtggcaaggagagttgtatgtcgcatcgttattccttctcttatttacagaaagggcgggtaatcagccccagaggtccggtggtgtaccagcggcggttaccgcggctacgggaatcgcggccgacggcctgcgtcaggcggtcaaggataatcgcgaggataacgatcccgacaccgccgacgctcgccagccccatatccagtcggccaataccgcgcagcaccatttgaccgaggccgccgacggcgatcatcgaggcaataacgaccatcgacagggccagcatcagcgtctggttgacgccagccatgatggtcggcatcgccagcggcagctggactttaaacagcagctggcgcgggctggcgccgaaggagcgtgaagcctcaatgaggtctgccggcacctggttaatcccaaggatcgtcaggcggacaattggcggcagggcgaagataatggtcaccaccacgcccggaacgttgccgataccgaacagcatgacgatcggcaccaggtagacgaacgccggcgtggtctgcatcgcatcgagtaacgggcggatgattttcgccgcccgcgggctacgcgccagccagatccccagcggcaggccgattatcatgcagaacagcagcgcggtcagcaccagcgccagggtgaccatcgcctgcgaccatgcgccgatagcgccgatggctaccagcgagatcagggtggcgatacccatgccgacgctggagatctgccaggcgatcagcgcgaagagaataattgctaccggcgccggcatccccagcaacagttgctggaaggcgctgagaatataatccaccggcacgcggatcccctggaacaggggacggaagtgcagcacgatccagtcgatggcgtgggtaacccagctatcgagcgggatcagcgttttatggaacggatccataatattgaaatgttctggctgcggcgcaggcgcgctgttaagccagtcggctccgccgccgtcagcgggcgccggtgttgggttgccccaggcgtcggcggactgcgccgcgttatccgctggcgctgcggtatcccatgggtttgattgatcagccattgtttgccccctcgcgatctaaagcctgtagcagcatgcgttttgaaataatgccgagatactggtgtccttcatccaccaccgggacggcgcacggcgcctggccaacgtgggagagcaggtcgctgagcggcgtttgtgcctccaccgcctgcggggagtcaattaacgccgcatcgagcccctgattttcgctcagcgcgcttttcagagagtcgatggagacaatgccgacaaacttattaccgcgttcaatgacgtagccatattcacggtcttcatcctgcaataatttcagcgccgaacgcgggccgaaaccgggagttttacgaatcaggccaaccgggctacggcgggcaatatctttagcgctaaatacctggctaatatcgacgccgcggaagaaagtacgaacgtaatcattcgccgggttattcagaatttcgtcaggggtgccaatttgcaccacttcgccattttgcataatggcaatacgatcgccaatacgcatagcttcatcaaggtcgtgggaaataaagacaatggtacgttgatgctttgcctgtaatttggtgagctcatcctgcatttcagtacgaattaacggatcaagcgctgagaaggcctcatccatgagcagaatatcggggttgatcgctaatgcgcgggctaagccgacgcgctggcgcatcccgccggaaagttcgtcgggataggcgtgggcgtaattttccagccccacctgacgtagcgcatccagcgctttctgctggcgctcttcggcggaaacgccggccagttccataccgaacgcggtgttattcaacacgttcatatgcggcatcagggcgaatgactggaaaaccatcgcaatctttttcctgcgcacctcgcgaagctcggcatctgagattttggcgatatcgacgccatcaatcagcacctgtccgcgggtgggttcaatcaggcgattgagaaggcgaaccatggtggatttccctgaaccggaaagtcccatgatgacgaatatctcgccttcttcaatggccagactggcgtctttaacgccaagcgatagccccgttttttccagtatttgctctttggtaagtcctttttcaatatatttgaacgcgcgttgcgggtgctcgccaaatatcttatagagattcttgatttctaatttaattgccatgcaataaatgatttcctgtctttaattatatcgatatcgtacctggtgaagattattacctttttacaccctaacatactgagattctgtgacaaccctcgatgtgaatagctagccaaaatctgaatagggatctctggctgaattgcccgtgatataagggctgagccatcatatacggctggtgatattttttgattatgcatgaataatgaatgggaaaattggtgtaaatgaaggaaatatgacacgaaaatggccagggggttatttgtgtgataatagaaaataatgtgaaatagatcactggagaatgtatcgatatattccccagcgatcgcgagattaaaagtcccaatcgtcgtcggcggtcgcttcagttttacccatgacgtaagaagaaccggagccggagaaaaagtcgtggttttcatcggcgtttggcgacagcgccgcaagaattgccgggttcacggcggccatttccgccgggaatagcgcctcatagccaaggttcatcaatgctttattggcgttgtaacagaggaacgcgttgacgtcgtcaagccacgggctgtcggcatacagttcgcgggtataagccagttcgttatcgtatagatccatcagcagatcaaaggcgaaatttttcaactcctcacgcttcgcggcgctgacgatttccagccctttttgatatttatagccaatatagtaaccgtgcaccgcttcgtcgcgaataatcaggcgaattaaatcggcggtattggtcagcttgccgcggctggaaaaatgcatcggcaaccagaaccccgaatagaagaggaaagattcgaggaacacgctggcgatttttttcttcagcggctcatcggcctggtagtaattgagcatcaactgcgctttgcgctgtagcggagcgttctcctcgctccaggcgtaggcggcatcgacatctttgctctggcacagggtcgagaatatcgaactataggagcgggcatgcaccgcctccataaagctaatgttcgacagcaccgcctcttcatgtggagtgagagcgtcggtcatcaacgccggggcgccgacggtattctggatggtgtcgagcagcgtcagcccggtaaagacgcggatggtcaactgctgctcctgagccgtcagggtctgccagtgcggaatgtcgttggacagcggcactttctccggcaaccagaaattactggtcagccggttccacacttcgaggtctttatcatcctcgattttattccagttaatggcgctgatgcgcgataaatgggtcatcctgttctccttacagcgcgcaggacacgcagccttcgatttcggtaccttccagcgccagctggcgcaggcgaatgtaatacagcgtcttgatacctttcttccacgcgtaaatttgcgctttgttgatatcgcgggtggtggcggtatccgggaagaacagcgtcagcgacagcccttgatcgacatgtcgcgtggcttcagcataggtatcgataattttttgcgggccaatttcccaggcatcctgatacagcgccagattgtcgttagtcataaacggcgccggatagtacacgcggccggttttaccctctttgcggatctcgattttcgccacaatcggatgaatgctggaggtggcatgattgatgtaagagatcgaaccggtcggcgggatcgcctgcaaattgcggttataaatgccgtagcgcatcacgtcgtcgcgtagctggcgccacatctcacgatcgggcagggtaatccccgcacgggcgaacagttcgcgcaccgtggcggttttcggctgccagtcaccctgcaaatactgctggaaatagtcgccgctggcgtaacgcgactgctcaaacccggcaaaacgcacgccacgctcgcgcgccattgccatagaggtgcgcagggcgtgccaggtgacggtgtagaaatagagattagtgaagtccagcccctccgggctgccgtaggcgatcccctcgcgggccagatagccgtgcaggttcatctggccaaggccgatggcgtgcgatgcagcattacccgccgccaccgatggcaccgagcggatatcgctcatatcggagaccgccgtcaggccgcgaaccgccacttcgacggtgcgggcgaagtccggcgaatccatagcgtgggcgatattcagcgagccgagattgcaggagatgtcctcgccaacggtggcgtaatcgagattttcgtcaaaggtggaggcgctgttgacctgcaggatctccgagcacaggttgctcatattaatgcgcccggcgatcggattggcgcggttcaccgtatcctcgaacatgatgtacggatagccggattcaaactgaatttccgccagccgctggaacagatcgcgggcgcggatccagcgtttacgaacgcggtcgtcggccaccagttgcgcatacatctcgctgacggcgatatcgccaaaggctttgccgtacagtcgctcaacgtcatagggcgagaacagcgccatctgcgcgtcttctttcgccagctggaaggtgatatccggaatgactacccccagcgacagggttttaatgcggatcttctcatccgcgttttcccgcttggtatcgaggaaacgcaaaatatcggggtgatgagcatgcaggtaaaccgcgccggctccctgacgcgctcccagctggttggcgtatgagaaggcgtcttccagcattttcatcaccggcaccaccccggaggattggttttcgatacgtttaatcggcgcgcccgcttcgcgcaggttggagagcaggaacgccacgccgccgccgcgttttgacagctgcagggcggagttcaccgcccgaccgatcgactccatattatcttcgatacgcagcaggaaacaggagaccagctcgccgcgctgctgtttaccggcgttgaggaaggtcggcgtcgctggctgaaagcgcccggcgaggatctcatcggccagctgtcgcgccagggtttcatcaccctgggccagggttagcgccaccatgcaggcgcggtcggcgaaatgctccaggtagcgtttgccgtcgaaagtacgtaaggcatagctggtgtagaacttccacgcgccgaggaaagtacggaagcgaaaaccgtgttgatgcgcgtgggcgaagagggccagcacgaaacgtcgctcatagcgggccagcactgccggatcgtaataaccttcgtcgctcagccattgcagtttctcctccagcccggcgaacggtacgctgttggggcgcacgtgattatggataaatgcttcgaccgcctgttggtccttttccaggggaatacggccgttgctgtcgtataaattcagcatcgcattgagggcgtggaaatcagacgccccggcggttacacgttctgcggttgtcgttgccaaaattcgcttactcctttacgcacgttgtcgacatcttgctgggtacccatcagctcaaaacgatacagatacggcacgccgcatttctgcgcgatgacctctcccgcccggccataggcctcgccgaagttacggttaccggcggcgatcacgccgcgaatcagtcggcgattatgcgggtcgtttaaaaagcggatcgcctggcgcggcacggcgcctgccgtcccgccgccgccgtagctggggacgatgagaatatagggttcgtctacctgaattcgctcgcgctcgttgagcgggatgcgcacggcaggcagcgccagacgctgcacaaagcgatgcgtattttccgagctgctggagaagtagacgatgaggctcataggctggccgtagccgcggcgggacgcaggcgattaatcatatccgggcggaagccggaccagcgggtttccccggccatcaccaccggtaattgctggaatccctgctcgcgcagcatgtcgatggcttcagggtgttggtcgatgttgaccatatcgaaggcgaaaccgcggctctccatcgcgcgtttggtggcatggcattgcacgcagtcatttcgagtgtaaataataatgcgcatgattcgtatttccatttaagataacaagacggcgtaaaacatcgtgccgaacgttatgggcttactgttcaggaaatactagatgtagtaatttaaaacttcaaccacgcaatatatagagtttttcgataagttatcccccaccgactagcctggcgggggagggaagtcgatacccgaaaattacatccgcatcgcgaccgcaagtcggttgaaggcgttcatcaggctgatggcgaaggttaaatcgctaatctggcggggggtaaaatgctcttctaaaggcaggtacacctcatcttcagcgtggctggctgcgatatcggtaaccgattccgcccatgccagggccgcgcgttccgcggtgctgaagtgggcgcttacgcgccagcctgccagcgcatccagcttgtcctgggcaacgccggctttgcgtaacgctttgctatgcatctcaaggcaaaaagcgcagccgttaatttgcgacacccgcaaatagaccagctccaccatcgtgctgcccaattcgcttttttccagcgctatgctggcctgaaccaaccccttatagatttccgggctcagttcgctgtacggctgacgtaatgtggtcatcttgcagttctcctctctaagacccgggcaaaatagcactataatggactgcataagatagccatattgtgatgaaaaaagcagaccatgatggaagccaaaaaagtgccgcgctaccagcgtatcgcccgacagctgaaatcagcgattgagaatggcgagctggccccgggaagccgcctgcccgcgagccgggtttatgcgcaggagcttggcgtgtcgcgggcgacgattgaaaatgcctggggcgagctggtggcccagggctggctggagcgccgcggccaggcgggcacctttgtcagcgagcgcctaagcccgcggcaggtcacggctcagcgcccgacggcaggccagggatcctccgcgccgcagccttttcaaatggggctaccggcactggatcttttcccgcgcggggtgtgggcgcgggtgatggggcggcggctacggacgcaatcgcgcttcgacctcgcgcccggcgatccctgcggcgaaccggttctccgtcaggcgattgtcgactatttacgtctgtcgcgcagcatcgagtgccagccggagcaggttgtgattagcggcaactatgcggcctcaatggcgctaattttgcgtaccctcgcgcaaccggggcagcatatgtggatggaggatccgggatatccgttcattcggccggtggttagcgcggcgggggtcaatatcgatccggtaccgattgaccaacagggaatggatatcgactgggcgcaggcacactctccgcaggcgcgttttgcgctgttgactccagcgcatcaaagcccgctcggcgtggccctatcgctggagaggcgccgccaggtactgcagtgggcggcgcagcgcgatagctggattattgaagatgattacgacagtgaatttcgctatcaggggaaaccgttaccgccgctgaaaagcctcgatgcgccacagcgggtactgtacgccgggtcatttagtaaatcgatgtttccagcgctgcgcgtcgcgtggctggtggtaccgctgccgttggcggcgcggtttcgccgtcaggctgaattgagccactgtaatgtaccgaccttatggcagcagacgttagcggacttcatcaatgaggggcatttctggcgtcatctgaaaaaaatgcgcgccagctacgcgttgcgcaggcagtggctggagtcggcgctgcaggcgcagggttttcaggtagtaccgcagtccggcgggatccaactggtgatggcggtgaagggagacgatcgcgagcaggctcggcgctgccaacgagccgggctggcggtgcaggcgttgagcgattggcgcatgcttagccgcggtgagggcgggctattgatgagttttacgaatataacgtcggcggtgatggcgcgtgaagtggtaggcgaattaaagcaagcgctggccagcggggaataacaaaaaaccctgcgtaccattgggacgcagggtcagacgcgtatttgttatcttcacatgtagtctatcaatactattatcgacgcaaattaagcaaaacgccaataaataccccaacggcggcggccgcgccaacgctctgccagggtttatcgcgcacgtagctgtcggcgcagccggcggcatcccgggcgcgttcaacggtatcataggccgcctggcgcaggcgggtattgccgttcaggcgggcacgcgtctctttcagcagcgactgcgcttttttgcgcgcattctcagcttcatctttcgcatcgctgccccatgatttcagcacttcttccagcgtatccgctaattggctgacttcgttatgaatatcctcggcgctttcatcaatatcgttgcggttcacacggttagccattggtttctccctttgttccattcgagttattaagtgtaggacatgattttgcattatgcttttgcgggagtttatggaattttctgaaagcgctgctattcgtgaataaggtaaggtaaatgtgcggtaaaagataacgaggaatcagtatgtatttaagacccgatgaggtggcgcgtgttcttgaaaaagccggcttcaccatggatgttgtgacgcaaaaagcgtatggatatcgccgtggcgataattatgtttatgtgaaccgcgaagcgcgcatggggcgtaccgctttagttattcatccggcgctcaaagagcgcagtaattcactggctgaacctgccagcgagattaaaacttgcgaccattatgaacagtttccgctctatttggcgggggatgcgcagcaacattacggtattccccacggttttagttcgcggatggcgcttgagcgttttctgaatgggctgtttggcgaagctcagccgcagatgtctcacggctaaatagtcaaaagcgggttggttgaaagcgggcgactggcagcggccagtcgctgaatgacaaggattaggctttagcttgctgataagggctgacgcggaacaggcgacggcagaagtcgagaaagtagccgtacactgcgcccatcatcattgataccagaatgtttgaactgaccgcggcggcaatttgatgccagtctgcgcctaccgacagcagaatcaatacatataccggtgactggaaagtcacatatgcgacgacgtcagcaatgtttttcatccatcccgaggtgctgattcggcgcgcctggcgcatggcgaagtcgcgatagaagccataaggcaccgcaataataatgttgaccgggatcgcgaccaggcgtgaagataacgactgctcaaaggtcattccggagaggaaaatttcgatcatcatattgacaacggtgcagtagaccaccattgcaaaggtgtctgctaccgcatgacgcaagcgggattgagcagagaacatcggtatgctcctcgaaaaatgaagtcaataacgccgaaaagtgcgcatggtgtagcggttttgggctgcctgttttgatgtgtgtagagtatatctctgcgtagtaagtgacaactagctataaatttttatttatcgcctttttgtcgataaaacactctgtgaactggcgttttgctcagcttgcgctacttttgttcctttgtttgattatattgtttaatatcaaatagatatgattttattttgtaagatgacgagtaagcatgacaggggaagggtggttgataaggcgggcgcctgattacgttatgtgatgctggtcactattggcgttatttactgggtgaatgcctttttatcagcatttgatgctgtatgtaaaaaatgggttttattctgattatgtgaatttaaattcattgtcgcaaagctattggcattccccacggcgggcgatgattttataactcactgaagtggctataaatataacattatgaatattatcatgtcgcactatgcattattcatctgcgctaggctgtatttatgttctatttcgctattacccgccaataaatttcagcgcgttcataggtgtaatcctgtacatatttatttgaataagctaaggctggaaataaatatacatatctattaaactgaccgggtaattcttgttttattttttcgatttgggatttttgatctttatgtcttttatgttacaaaaactgaataatattcgctcactgcgtgctatggcgcgtgaattctccactgacgtgcttgaagagatgctggaaaagctcaggatcgtcactgaagaaaaacgcgctgagcagcagaagacgcaacagcagcaggcagaatatcaggagaaaattaatacctggctggaattaatggttgctgatggtatttcacctgatgaattagtgctgcatgaaatggccccggcgaaaagcagtaaaaagcgtaagccgcgtcccgctaaatatcgttataccgaccataccggcgcagaaaaaacctggaccgggcagggacgtatgccgaagccgatcgctttagccgtcgcgcaagggaaatcgcttgagagcttcctgatttaaatcgagcgtaggttaaaacggtgggattccccaccgttttacttagcagacgccgaaatcgccttcttcggtataaggcgtaacatcaaccgctttcagagtaaacttttcaccctgctcgttacttgcctgaacgacgaccagactatcgccattcacttccactaccttcaattttggcccgccgacgcgcggttgtaccagatcgcctgttgcaaacatggtgtttctcctgtgcattggtcacaactaagaacctaaacgatagctcaacgacgctgacggattcaatgatcgtgctgttttttgttaaaacaatgcggggtggatgtattatctttgttaatggttttaacggcgctgcggtgaaggcaactaacgctgccagcgaggaatgattaaaaacagaacatggtcagataagcgaatatgaagtatatcattttacttattattataattgctgtgctctacgtccattatcgcggaaaggttcgctatcgtttctggcggcagctttccgatcattcaacttttaccgcgccgcttaatggctttatgtaccttttttctcgcgtgccaaatacgccgtatctacgcccggagacttttccagagttggcgatattacaaaagaactggttggttattcgtgaagaggggattaacctgcagcgtctggagcaaataaaagcggcggaaaaatataatgatgccggatttaactcattctttaaaaccggctggaaacgtttttacctgaaatggtatgaagacgcgcatccctccgccagccagctatgtccaaaaacgaccgagctgctgcgtgggattccttcggttaaagcggcaatgttcgccacgctacccgatggtagccgtttacctcgccaccgcgatccttacgccgggtcgctgcgttttcatctcgggctggcgacgccgaatgacgaccgctgttttattgaagtggacggcgaacgctacagctggcgcgatggtgagggtgtgctgtttgacgaaacctatattcactatgcggaaaataccagcggtgagaatcggctgattcttttttgcgatatcgaacggcccatgcgttaccgctgggcgcagaaggtgaaccactggctggggcgaaatttaatgagcgccgccgccgcgccgaacgacgtcggcgaccgcaccggcggaattaatcgcagcttccgttacatttatcaaatccgcattattggcaagcgattgaaaaaatggaataaaacggtttattacatcgtcaaatggctgctctttggcggcatcgccctactcatctggcaggcgttttaacgccggttccacggcatgaccgccagcaggcgcgccatgccgcagaaaccggtgagaccagcgaaagtgagccccgcgccaacgaaaccactcagcaagaaaaagccgctgttgacggcgtatcccagcactacgcccagcaaaatcagcgcgcctgcggcgatttgcacttggcgcattagcggcagcggctgggatttatcttcgactatcggcaaccccgccgcccgccacgcctgaataccgccagccagcagcttaacctgcgcgggcgcggcggcggcggccagaaaactggcgttattttgcgtgcgcgagccggcctggcagtgaaaaatgatggtgtcgcccggctgcgcattgagcgccgcgccgtgagttaattgttctaatggcagcagtgtcgccgccggaatatgctcgcgggcgtattcgtcggcagcgcggatatcaatcagccgtgcgccctgggtgataagcgcctgggcttcgttggctgaaacggtggcgatagtcataaggactccttacgggcagtaaatggtcttcagcgtggcgatgacctgctgaacggcgggatgggtaatgaaatagcgcaggcgctgcgcatcgcgctcgcagtcgattagcccttcatcacgcattcgtgcgaggtgctgagaggtggcggaagggctcaggccggtgatttgcgccagctcgcctgcggttgtacgcggggcttcgcagagcatgcacagaatcagtaatcggtggggattgctcatcgctttcagcaggacagcggcttccccggcgctggcctgcagttgttgtgctgtggtcattttattttagtatttgctaaatttagattattctaaaataaaagatgaccctttaccagccgtataaagaacggagctcacgcctgctgagcggccctggcgatatgctggcgggcgtgggcaatgcccgcgtcgcggccgtgcgggcgaatatccatcccttcggcgtagataaattcgacgtcgctaatccccatcaatcccagcaccgcgcgcaggtaaggggtgaccgcatcgctgggttgcccgtcatggacgccgccgcgcgaactaatgaccaccgcacgcacgccttccactagtccctgaggccaggtctcggtgtagcggaaggtttcccgcgcccgtgccaccagatcgaaccagtttttgagatcggttggcacgttgaggttatacatcggcgcgccgatcaccagcagatcgctggcctttaactcgccgatgagtgaatcagagagagcaaccccttgctgaatcgccgggcgcgggtcttgcgcgccgcgcagcgcggcaaacaacgcgccgtcgagtttcggcaaggcgagggtggtcagatcgtgttcgacgaccgaatcctgatgaccggcctcgcggcgggtctgcatatattcatctattagctggttggttagcgacgccgggccgttgatgctggattttaaaatcaaaacgttactcatgacggactcctcataaagttgatggtccgcagggtaacactgtctttttttctccagtagtgacattattttttatcattgtatccatacaggaaccaatcaatgcgcagtgatttaaatgcgatcccggtatttgtcgccgtcgtcgaatgcggcaactttgcgcaagccgcggagaagctgaacgtgacgcgatccgctgtcggcaagagcatttcccgtctggaacagcggctcggcgtcgcgctgttccagcgcaccactcgccggcaggcattgaccgaagaaggcgaggtcttttatctgcaatcccgccgggcgctggataacctgcgggatgcggaaaatgaaattcagcgtggaaaaaccctggtgcaagggcggctgcgaattagcctgccggtgctgtttggccaacgctgcgtggcgccgatcttgtttcctcttagccaacgttatccggagcttaagcttgagctgtcgtttagcgaccgtcaggtcaatctgtttgaagaagggttcgatatggcgatacgtatcggcgcgttgagcgattccagctttcttaaggcccggcgtttaggccagcacggcatgattctctgcgcatcgccgttatatctgcataatcaaccagcgccgcagacggcggaagaactgcacgagcatcttaccatcggctatctctacgccgggcagatgcagaaatggcatttgcgcgatacgcagggagtggcgctcgcgtttcgccctcagcccggactggcgatggatgatttcgccgccatcgccgcggcggcaaaaagcgggctgggtatcgcctggctgccggattggctggtggcggacgagatagcgcggggagaactccagcaaatattgccgtcgtccgtcagcggcagttttgcgatcagcgccgtctggccggaagcggtatgggtgccgcagaaaattcgcgtggtggtagatgaactgctggcgcggctgccgcagcagttagccggtggagaaaaccaggaggattcttcagcgtcaggttaatccgggcttaaggtatgccggcgataatgacagcatgatgactgtgacgagaactcgccatgaacctgttagaaacgtttaaccagaacgccttccttacgctgaatgccgggccaggtacgccggacagcctattgctactggctcaattctccgccagctggcttattctcattgtgccggcgatattgctgggattatggttccttggcggtcgtcaggggcatcgacaggcgctgttttgcgccatgacgattttgatagcgttagggctgggggttgcctgtggaaccctgtggttccatccgcggccgtttatgatgccgctgggtcatacctggataagccacccggcggataactcttttccaagcgatcacggcaccgtaatgttcagcgccgccttcgcgctgctgtcattacgcctgcgcggcattgggctgctggtgctggcggcggcgctgccggtagcatgggcgcgtatttttctcggcgtccatttcccgctggatatgctgggcgcggcgctgatttcagcactgagcctctgcgtagcaaaagtggtctggcaacggctggggcagacgctggtggcgctgtgcgaagcgctgagccgccgtctcttctcctggctgccggcgcgctttacgccgtagtcacttcctttgtacgcgcgcggcccgtcgatacagcgtgctgcgcgcgacgcctaacgcctgcgccgctttactcacattgccgttaaagcgggccagcgtatcggcaatcagctttgcatcatgttgttgaagcccgcccggagcgctggtttgctgcgcgctttgatactcctccggcagcgccgcgacgcccaggcattcgccatcgtccgccagcgccaacaggactttgagcaggctttgcaactgacgcacgttacccggccaacgacataatgtcagttgatgaatcagcgcgtcagagagggttatatggcgttctgccgcgccaagcgagcgccacaacgctggaataaactgcttgagttcaggccattggcgtagcggcgggatggtaaaagcatactcgcgcaggcggtagagtaggtcttcgcgaaatgcgccttcggcgacgcgctgcgcgagatgacggtgggtggcgcaaatcaaggcgaagttcaccggcgcgctgcgattcccacccagcggcatgacctctttttcctgcaatacccgcagcagacgggtttgcagagccagcggcatatcgccgatttcatcgaggaacagcaccccaccatcggcttcgcgaattttgccgatatagccgtttttattcgcgccggtaaaggcccccgcctgatagccgaaaagctccgattcaatcagcgattctggaatggccgcgcagttgatggcgacgaatttaccgctgcgccagcggctatgcgcatgcagttcacggctgaggaactctttgccgcagccggtttcgccttcgatacacaacgcgataccggcgttgagcaggcggaccattttctcgccttcgccggacggacaaaacggcaggttaagtgctggttgcgcggggacggcgacgctggcgcgggttggcgcgcgcagacggtagtaatagccacgttgctggaaggtcatcggtagcggcacgctgaccgccgtttgcgtcaggcgggggaacaactgctggaaggtcatttgccctatctgtccggcctgcaggcccagctcgcggatggccaggcgattggccgcggtcagcaggttatcggagaagaccagcagcagctcttcggcgctatcgagcttctgtacccgcgagtgcaggctcattaaccactgttgcggatgcagactctgtttcacccacagatattcaatctgtttggcggcctcttttatccacgccagagagtggggatgcgggatatgcgccgggccggaaatatccagcgccccggcaatctggccatcggggctttgtaggggaaccgccgcgcaatacaaatcctgattacgggttaaatagtgttggcggccttcgacttcgcagctgtcgtcaatcgccagcgcggtaccgatagcgttggtgccgcgaccactttcgctccagatattgcctggctccagcgcgaagctttgcgctttttccatcgctgcgctattgccgaaggtttggagtaccagcccgctggcatcggaaagaatcactaccgattgcagcccggcggcacgttgcgccagcggcgtcgccaccggttgcgccagccgttgtaggctgcggttgctttccagcacgtcggccagttcaccaccgcgcaggcgcggaaattcgtcgctcgttggctgcaggccataacgctggctgcgttgccaggagtcgctcagcagcgtgctggactgcgcctcgggggtgatagtgaacggatttccttgcacggcgcacctcgtggtcggctggtttgtgttgcaatattgtagcaatttggttttcttggtgttgcgatttgcaacacagaagcgggatcctgtgcgacaaagaggacgcgaatcggcagagggatataggtaattatttggaaattatgaattttatgtgaagtacgcaaacctggcataacccctgctacaggagaaagcgtgcagcggacaatagcaaaaaccaccacgccgctgcgccttaaccctacagaaggagattgctatgcgttatgttcatcctggcaaaccgggcgctttggtttcattcaaatcggcctacggcaacttcatagacggtaaattcgtcgagccgttaagcggcgaatatttcatgaatacttctcccgtcgatgggagcaacattgcgcagtttccccgttccgacgtcaaagatatcgatttggcccttgatgcggcacaccgggcggcggacgcctgggggcgaacctcggtacagcagcgttctcatcttctgctgcaggtcgccgaccgcattcaggagaatctggagtatctggcggtagcggagagctgggataacggcaaaccaatccgcgaaaccctgaacgccgacctgccgctggcggtcgatcatttccgctatttcgccggttgtctgcgcgcgcaggaaggcagtaccgccgaaattgacgacaccaccgtggcttatcatttccacgaaccgttaggcgtggttgggcaaattattccgtggaacttcccgctgctgatggcggcatggaaactggcgcccgcgctggcggcaggcaactgcgtggtcttaaaaccggcggagcagacgccgctgagtattactttgctgatggaaattatcggcgatctcttcccggcaggggtgttgaacgtggtgcagggctttggcaaagaggccggcgaagcgctggccaccagcaagcggatcgctaaaatcgcctttaccggctcgacgccggtaggccgtcatattatggcctgcgcggcggagaatattattccctgcaccgttgagctgggcggcaaatcgccgaatatctattttgccgacgtaatggatggcgaggaggagtttatcgagaaggcggtggaagggctggtactgggcttcttcaatcagggagaagtctgtacttgtccgtcgcgcgcgttgatccacgaatcgatctacgagccgtttatggagcgggtaatggcgaaagtgatgcagatccgtcgcggcgatccgtttgataccgaaacgatgatcggcgctcaggcatcacgccagcagttcgataagatcctgtcatatatcaagatcgctcgtgatgaaggcgggcagatcctcaccggcggcgatcgggcgagcattaccgccgagctggatagcggcttctatattcagccgacgctgattaaagggcacaacgagatgcgcagcttccaggaggagatctttggcccggtaatcggcgtgaccacctttaaggacgaggcggaggcgctggcgatcgcgaaccagacgcagtttggtttaggggccggggtgtggacgcgggatactaacctggcgtaccgcatggggcgtggcatcaaggccggacgagtgtggaccaactgctatcacgtgtacccggcgcatgccgcgtttggcggctataagcagtccggcgtcgggcgggaaacccacaagatggcgctggaagcctatcaacagaccaaaaacctgctggtgagctacggcactgcgccgttggggctgttttgattcatttataacggctgacccgggggcggcgtaagcgccttccccgggctacctatggctctgggccacccattgcactggatctgtagtcccgcgcaagcgcagcgccgccgggcaatatccgcggataaggcgccgcttttgcgccggatggcggcttcgccttatccggcctacggtctgtgcgctccctgcgccatgagagccataacgcagaagaaatatcgggagcgcaatgtgctctgaattaacacaaagcacatgttttccgtacacaaaaccgttgcaaaccgataacagtagcaccgggcggcgcccggtctcatcttattgtttgcgctttccagcagcggacctgcgcgccattcgcttgcgcctccagcggctgcggccgttcgcagccctggctggcgtaaggacagcgttcccgaaagtagcagcccgtcggcagccggcggttacccggtagttcggtattgcgcacgccttcgcctaatggtgaaccgatgcgcggtaccgactccatcaatagccgggtataaggatgcgcaggattatccagcacctgccgtgcctcgcccatttcaacgatttgcccgagatacatcaccgccacccgatcgctcatatgacgtatcaccgagacgttatgcgaaatcagcacgtaggtgagattttgccgctgctgcagttcgaccagcagattgaggatctgcgcctgcaccgagatgtccagcgccgaagtcggctcatcaagcacgataatctccggctgcgacgagagcgcacgggcgatggcgatacgctggcgctggccgccggaaaaagcgtgcggcagccgatcgagatattcgctacggatccccacctgtagcgccagctgctcggcgagatcgcgacgcgctttttcaggcatgcgcgactggatccacactggttcggtgatggtgcgccagaccggtagccgcggatccagcgatgagagcggatcctgaaacaccatctgcatgcgtccgctctggttttcgccgcgcgccggcgcgcgggtgaagtggccggaagagggctttaacatgcccatcagcagcttcgccagggtgcttttcccacagccggattcgccaacgattcctaaggtttcgccgcgcctggccgtcatatccagtccatttagcgcatagacgcgttcgatgactttcccgcgccagtttttctgcgcggcaaaggtcaggtgcacatcattgagggttaatagcgtctcagacatgggcgttctcccgttgcgggtaccagcaggcagcctgtctatcggcggcgctatcatgagcctgcagcgtgggggtgataccgcaggcttcacccgcggcgaagcagcgttcgcggaaggcgcagccggcgggaagacgcgccagattcggcacggtgccgggaatggaacgtagcggcgtgcgcggttctcccttatcaggagcgctgtttaacaggccaatagagtagggatgctgcggctgctgcagtacttctccggtgttgccgctttcaatgaccgcgccggcgtacatgacgtacagccgatcgcacacctgagagaccactgccatatcgtggctgataaacagcaccgccgtgccggtcgcccgggccttttgcttcagcaggcgcaatacctgacgctgcacggtgacgtccagcgcggtggtcggttcgtcggcaatcagcaggtcgggctcgcaggagaaggcgatagcgatcatcacccgctggcgcatgccgccggagagttcgaagggatagcgcttgagcacgctttgcggatcggcaatttgcatatccgccagtagttcgacggcgcgggcgcgcgcttcacgcaacgacatgggacggtgctggcggatgacgtctgccatctgcttaccgatgcgtcgggtggggttaagcgcggtcatcggctcctgaaaaatcatcgcgaccttgctgccgcgaatatcgcgtagcgttttttccgtcaggttgagcatatcgtgacccatcagggtgatagcgccgctatgaatgtggtagctgccggcaggcagcaggcgcatcgccagcatcgcggtcaccgatttaccagaacccgactcgcccaccacgccgacgatttcaccgcgatcgatgtgcagcgagatattattcagcacgttgacctggccctgatagaccgggaaactcaggcgaacgttatcgatagttaagacccgattttccattagttgcgccctccggctttgggatccagtagatcctggatgccatcgccaaacaggttaaagccgacggcggtgatcaggatcgccgcgccggggaaggcgcagtaccaccactgatcgagcacgtagttgcggccgttagcgaccatcgcgccccattccgcggtgggctgctgggcgccgaggccaataaaaccgagcgtggcggccatcagaatcgcgctgccgatatccagcgaggcctgcaccaccagcggcggcagggcgttacgcagaatatgccagctgatcagatgccagcgcgaggcgccaaacgtcaccgaggcctcgacgaaagtatgctgacgaaccaccagcgtctggccgcgcgccaggcgcacgtaaaatggaatacgcacgatggcgatcgccagcatcgcgttgaacaggctcgggcctaacgccgccgccagcgccatggtcaacaccagcgacggaatcgacagcataatgtccatcagacgcataatcagcgcgtcgctgcgcccgccaagcaccccggagagacagcccagcagcgagccgctgatcccggcgatcaataccaccgccagccctgcggccaccgactgctggctgccgatcagcacgcggctgaacagatcgcggccgacctcgtcggttccaaaccagtgatcgaacgacggcgcctgcagacgcgcggcaaggttgatagcgttaggatcgtgcggcgtcagccacggcgagaagatcattaaaaacagcatgatcagcatgatcgctgcgccaatcagcgttagcgggctctggcggatcaaccaccaacgacgcttccagtggccgcttttttcagcctttggccgtggaagcggttgttcctgagtcatcatcacttagctttctccccgacccatgcgcgggtcgatccataaatagagcaggtcgactaccaggttgaccagtacgtaagcaaaggagaccacgatggcgaagcccatcacggcggggaaatcgagcgcctgaatcgaagacaccacgtaagcgcccattccaggccaggcgaacaccgtttccgtgagtaccgcgccgtacagcagatcgcccagcgccagcccgagcacggtgatggaggggatcagcgcgttgggtagcgcatagcgcaccacaatggtgaatttcggcaggccgctggctaacgcggtccgaatgtaatcctcattgagctgctcgagcatcgccgagcggatctgcctggcgacgatgccaagatgaacgaaggcaagggtggcagccggtagaatgaggtgctgcagggcattgaagaagacttcaatattgccttccagcagtgaatccagcagataaaaaccgctgacgcgggtgggcggatcgaaccagtcatcgagcctgccgctgccgggcagccagtcgagcttgccgtaaaacaagacgattaccccgagaccgagccagaatgccggagtcgagatgccggtcagcgccatcaggcgcaccaggtgatcggtccagcgattgcggtaaaccgccgacagcacgccgagcgggatgccgaccagtagggcaatcagcagcgcgcaaaaggccagttccagcgtcgccgggaagaaggtttttaaatcttccagtaccgggcggccggtgcgaatcgaggtgccgagatcgccgtggagcagggcgtcaacgtagcgggcaaactgctgccagagcggtaaatccagccccagctgctggcgaatatggcggacgatttcatcgctggcgcgatcgcccgccagcagccgcgccgggtcgccgggaatcaggtgcgaaataataaaggtaatcacgcagacgccggcgacaactaaaatcagcccccaacagcgctgccgtattaaaccccagaaactcatgatggcgctcctcggtcgggcctgcgacggcccgacccgacaagatggagagacggcccgctacttgtgcatgtcggcgatattgtaaatctgctcaagcatcgggttgaaaacgaagcctttcacctccttgttcatggcgacctgatagttcttctggaacaggtagacgtaggcggcgtcatcaatgacggttttttgcgcctgctgataatctttggtccgcgccgcctgatcggtggtggcaaccgcctgtttcaacaacgcatcaacctgtgggttatcgtagaacgcgcggtttcccggcagcccttttttgtccgactcgaaccagtagttcataaacatataggggtcggcgaaatccgggctccagttaccgatagcgatgtcgtaatcacctttacccacacgctcgcgcatggtggcgttggccagtttctccagcttgacctggatacccagcgcctgcaggttggcctgagtggagagcgcaatcggctcccagttcggatcgttatcagagtagaggaacgtcagcgttttcggcttatccgctaccttgtccagcgccgctttggctttgtcgagatctaatgaatactgcatggcgctggcgtcgtaaccccacatgccatcggggatcggcccgcgcatctgcttaccgttaccgccgagaatgccgtcgaccatgcctttatagtccgttgcccacgacaccgcgcggcgcagatccgcctggttcatcggcgctttgctgttgttgagatacagataggtgacgcgcagcgccggatagtcgtagaccgtcaccttgtcctctttcttcaatgccgcaaactgatcgaccggcagggcgtcggcgatatccaaatcgcccttggtcaactgcagacggcgagcggcgctttcgccgatgattttcaccgtgacgcgcttaaaggccggcttgttgccgctgaagtgcgggttgggtaccagcaccaactgttggcctttctgccagcgctgcaggctatacgcgccggagcctgcggtgtgctcggccaaataggcgcgggcgtcatcggcggcgttggctttcagcaccgccgggttaatgatggaggcgccgtcattggcgagggtatgcaggaacggcgcgaaagattccggcagcgtgaaacgtacggtggccggatcgacgacatccaccttcagcccgctgggaaacgcctccgatggcccctgtttaatgcgcatcaggcgttcaaaagagagtttgaccgcctctgccgtcaccggcgagccgtcggcaaactgcgcgcctttgcgcagagtgaaggtccaggttttgccgtcgtcggaggcctgccagttttcggcgagatcgccttcgacatcggttgaacctttgccattatcggttttgtatttgaccagccgctggtaggccggataggtcaccgtccagtcgttgttatcgatggtgacggccgggtcgagcgtttgcgggtcggcggctttgccgatcaccagcatatcttttggcaccgcggcaaaggcggaagggatggcggcgcagagcgcggcggctaatagtaacgggcgaaaacctacggatgctgggcgagtcatgttcatggtgaaactccgtcaatctgagcgggggagaaacaggcgaaaacatcatcgagtagcggataaccggccgcgtccggtagttcgaagtgccaccattccgtggtaatacctttaaagccgccgccgaacataatggcgttcagcaacaggcgattgcgctgggcctcctgagctaccgccgggtggtagggatgcgagcgatcgtccatttcgtcaaaggcggtgcccatgtcgagcaggttgttgtgttcatcgagtagcgttacgtcgatggcggtgccgcggctgtggttggagccgatattggccggtacgacataatcctggttcgggcaggcattccacagcagttgctgggcgcgctgtggacgataggcgtcaagtaccagcaggcgatagcccgccagcgcggcgatggcgatagatttctccagcgcgacggccgcgtcggggtgcagcaggcagcgggcttcgcggtaaatcggttggccggtaatgttatcggcggtagcgtatttcaggtcgacaggcagcgtgggaaaacgcgcggcgatatccaccagggaaagatggctcatcgaaaatttccttaacgttcaaactgaccaaattcctgctgcagcgcgcggttcgcggcaaggcggctggagaggctcggccccagccgttccaccaccgcggagagcagcagattaaaaaggcaaccgatcggcgccagcgaatcccagaagtggccggtatcggtttttacctgtagtaaatcaaccggatagtcgcgcgcccacggacaccagatatcggtgaccagcgcggtggcaaccccgcgttcgcaggcgacccggcaaaactggcgcgcggcgacggagtaagcgcgggtatcggtcagcaccacataggggcgctggtattcagaattcaatgattccagccagctaccggagctgccgtcggcgtaggtcacgcgcgggcgcaggtattccagatggctgaagaacgtgttggcgatgccgcgggtcgactgaatgccaatgatgataaccgcgtcggcctcggcgatgcgttgactgacgcgggcgaaggtcggttcctgcgccagttgatagacatagcgaatggcatccagctccatctgcaacgacaggctggcgcgatccggctgcgcctgctgctgtgaccaggagtcaagccggtcgatcactccccactggcggtagggcgttgaagcgggctccttcaggctgtgcttcacgtcatcgagattgcgatagcccagcttgcgcagatagcggcctacggttatcccgctggtgccggtggcctgcgcaatgctgtcggcagtctcaaacgggatatgctcccgatggcttaacagccagctgccaatacgcttttcgctcggcgtgagctggctgaaagtggattcaataatgtgaaacaagccgttgctatcgttcatctctgcccttaatgatagttcgctctcatttaacagaattctgatactcaattaacaaagcacgatgtgtgccagctattgcgggaaatagtatttcccgcaataacgctaatctattgggaggtgtgcggatcctgagcgtaggatttggttattcattgcacaaataaggtgcaatgaatcctggttgtgcatcacaaaataaaaacatttcattaacattttgtgatatggataaagcatggatgctatcaataggaggtgtgctggctgggtgacgacattacgctggacaggaaagggtgaaaaatgaaaatcgcatttggcgaaataagatcgttattacaaagtcagcgtattttcctcggcgggcagaggctggtttgcgaccatccgttttatcgtgatgagcaaccaattgaagtaccagaaaatttatgcactgaaccttataccacctattgggggcgctgtggcgagcggttggcttcgctgggggctttcagttacacccgtacgttgttgccggcgtttattcaggttgggcgctacacctcaatcgctgatagattacaggtattaggcgatcgtcatcccttagagtgggcaagctccagcccggttttttacgcccgtcattcagcgctaatggaaaccctggcagcggataacggacgggaaaaccatttttacgcttttgaaaaacagacgcgccccatcgtgattggcaatgatgtctggattggacaaaacgtgacgttggcgcaggggattaccattggcgatggcgcggttatcgccgccaacgcgctggtggtgaaagatgttgccccgtataccatggttggcgggaacccggcgaagctcatcaaataccgttttgccgaaccgattgttgagcagctgttagcgttgcgctggtggcaatattctgcgcaggatattgctatgtttccggtgaacgaggtggcgcgcttttgtgaattactgcgtcatgcgcaggagcaaggtgaactcacgccgcttgcgctaccaaagctgacggcaacggtggtgaaaaccgtggtcgctggcggcatgaagatgaaatcataaggaatttaagatgaagttaaagttgggtgtggccctgatggcggcggtgatagcctgcggcgtccaggcgcgcgatatgcagtcgattcaacaaagcggcgagttaaaagtcggcgtgccgggggactacgcgccgttggcctttcataacggcgctggtgaacttatcggctatgacgtcgatatggcgcacgatctgggtaaaacgctgggagtgaaggtgacgtttattatcaccagttggccaacgttatcgactgatttaaaagccgataagtttgatatcgctatgggaggcgtaacggagacggcggcacgggcaaaagatttctccctgagccatccggtggtggccaatggtaaaatcgccctggcgaactgcagcgccgcgccagcgctcggcagccttgaaaaaatcgaccagccgaatgtgaaggtgattgtgaaccccggcggtaccaaccaaagtttcgttgatgagcatatcaagcatgcgcagatcatccgtgtgcagaacaatgtcgataatctgcaggcgctgcggcaaaaaacggccgatatgatggtgaccgacctgatagaaggggattactaccagagcaaggagcctggcgtgttctgcgtggcgaatgagacgccgttccccggcaccgccagctataaggtctatatgatgaataaggataatccggcgctgcttgagaaagtgaaccactggctggatagccaggacaaaaatgtgctcaagcggaagtggaaaattcaggggtaattcatgattcgcgctgccgccagaatgcgacattctggcggcgcagtggattagcttttctgccgcgcctgatagcggaagtagcagtagtagccaatcgaggcggtcaggcaaagcatgtagccgaacgactcgctaccctcttcaacggtgtttttcaccacccgcgcgtagttctcatcgagtacggcataccataagccatgcatgccgaacagccgtgagaagaccagaatcgccagcaggccgcttatcatcatgccgtagtaaggcgtgcgggtgtattgcgccagttgcgacagcgtttgacgagcgtggcgcagcggagcgattagcgcggctatcgtcgttgccagcgcgaaccacacccagctaccgtgactaataagatcaaacagcgcatccagttcgcggatcagcatcgccaggaagaagccgccaacgaggatattacagtagcgcaggagctcatattttttcgccagcaggaagtgaatcagcacgattatcgccagcacgccctcctgcactacctcggtaagcgaaatctccgggatatcgttgccaaacacccggatatccatccatagacaaagtaccgcgatggcggaagccgccgctgcgccgagaaagaaaagtaagcttctgatgacagacattaacaccactatttatgttcaaaacagcaatgataagtatcgtgaatgcgacttcctgttcactttgtgcgacatcgcggcgtgttttaaaccttttgagctatttagcgctaaatagcgcaactgcaggtgagaaaggggagctttgctccccctgcttagcggggtaattcagacaatatcatcgactacgccgccatcgacccgtagcgcggcgccggaggtggcggatgcctgcggcgaacagacgtagaccaccatattggccacctcatccaccgaggccgcgcgctgaataactgaagcggggcgctgcgccataacaaactctttcgccagttgttccagcggcttaccggttcgcgtgacctcatctttcatcatttcggcaaaaccgtcagaaagggttgggccgggcagcacgctgtttacggtgacgccgctgccggcgacgtatttcgccagtccgcgcgccagcgacagttgcgcggttttggttacgccgtagtggatcatgtcggcgggaatattgcgtgccgattcggaggagataaagaccacccgaccccagcctttacgcaccatggcgggcaacagcgcgcgtgacaggcgaacgccggacatcacgttggtttgccagtagttttcccaggtggcgtcatcggtggcgtaaaaatcctgcgggccgtaaataccggcgttattcaccaggatatcgacttcattcaccgcctgcagcagttggctgacgcccgcggcgtcactgagatcggccaccgcgggatagggccggaatcccggcacctcctgttgcagccgcgccatcgccgcattaacgctatgttcgctgcggccgttgataatcacttccgcgccgctggccgccagccctttggcaatggcataaccgatgccggccgtggatgccgtcaccagcgcgactttccccgataaatcaatattcatggttgagccttttttatggaatggagtagtaagcgtagcaggtgggggaagggggcttcggtcagtggcaatcaacaatatcgatggtgatatcgaaattatccgttagagcatagcggtgagagcctctaataatggaggctgtttttggcgattacactgatactgatgagtaaacgatgaatactacttttcccagtaaagtcctcggcgatatgcgcgttactgccgtaagcgatggctatttgcaggtaggttttggcctgttaaccaaaattgatgaagacgagtgcagaaacattcaggcaaacgcccgtatagcacaaccgaatacggtcaacataaacacctttctggtacaacaagccgggatgaatatcctgatcgatagcggcgctggcggcgttaaagggtggggaggccaactgatcaataatctggctaaacttggcgtcaaaccagaggatattgacgccgtactgttgacccatgcgcatcccgatcacatcggtggcttaattaattcgcagcaagacgcggtatttcctcgtgctgaattgataatacctcaagatgaattcagttatctcgaagatgaccgtaatttggttacggccagtgaacgcgttaaaggtaatgttatgttcgcgcgcagcgtgtttaaacaatatcagcatcgtttacggctgattgatgaaggcgaggtgtttgctggtatcagtgccctggcattgaaaggacatacgccaggtcatacggggtatctcctctctggaagcatagaacgcgtattagtgtggggggatattgtgcattttccccatattcagttattagaccccgaggtcacgatagccttcgacttcgacccgcttttggcgcaggagacgcgcattcgccttcttgaaaaggtctgcgctgaacagatactggttgccgggatgcattttgatacagcaggtttcgccaggattaaaaaatgctcgtccggctatcaaattatcccggcggacggaattaatagccagtctcacgcagccgtggatcctgaaatacggatgccaccatgaggttcaactgctgcaaatcgaaatgggtgccctcagggcggcatagcagctcaattccgaaatcattaaactcacctgttaatggatggatttttattttttgctggatctcatcgctgattgagcaacgcagcaccagcgagacccctttgccatcggcgatatttgagaacagcaccgggtaagagccgcactccacgacgcgcctgggagtaatgttgccttcacggaataacatatccagattgcgcgttgaagttgcgcattttttactactcaataaaaagacattgtcatccagagcggaggtcgcggtgatggctggatgatctttcgcggtgataatcactaactcactagtgagcaacatagcgcgcgtatgctgtggggaggagaagcccgcgccaataatgaccgcatcatattcgtgtctatcgaaagcattaagtaaactgctggtattgccgattgaaacatcaatatcccagcctaagtcatggcctgaatcaatcaatgcgctgataacatagggcggcaaacattcaatgatgccgattttaatcgttaatcggcgtctttttgaaagggtaatgttgtgtttgcaatcatccgccaggttaagcattttgagggcatattcatacaatatctttccctgctcggttgggatgcacccctcgttcttcctgtctaatagcgtggcatccaggctactttccaggctgcgtatccgatgggaaatactggattgcactcgattcagacgttctgccgccagggtgatattccccgtttccacaacagtaacgaacgccagaagttcattaagcttcatcttaaaccttatatgagcgttattttctaaccgccagcatatttataaattttggtgactactttgtcatcagatttttaattattgacgaatatagcgatgattatcgcggtgacgaacggccatcgattttttcgctaataatctcgattttattctctggtttttccctctggcgacattcataacaataaaaccatttgatctgttttgataaggacctgcggatatgtcgctggtaagtagttgttcacttgatcaaggttttgaggcgccgaggcgctatttagccgccgcggccatactaatcggcgtgctaatggcggcgctggatagttccattgtcaatgtcgccttgccttcgattgccagtgcgttacgggtcgattcggcgtccggtatctggatcaccaacggctatcaggtagccagcgcggcgacgatgctgatttgcgcgtcgctgggcagcagaatcggtgagaagcgtttttatacggcgggaatggtgttatttacgctctcttcgctgggctgtagccttgcgccgacctttggcgtactggttaccatgcggatactgcaaggggtaagctatgcggtcatgataagcgtggggctgggcttgtaccgggttattttcccaccccgcgcgctaggaacgattttcgggctgaatgcgctggccttcgcggttggcacggctatcggtccggcgctgggcggatttatcatctcgtcgctctcctggccgtggcttttctatatcaatatcctgcctggcggcgctgcgattgttttctccttgatttcattaggggaggataacgaaaaggagcagggctttgattgggccggggccgtgagttcagcggcggcattaggcttgatggtggtggcggtcgatcaaattggccgctgggagggccgaacgcttatctactgcgcggtggcatcagtggcgttatttgctttctttattatcgcccagacgcgagcgaagcatccactattgccgcttgatatatttcgctcacgccaatataccctggcggtgatctcgtccagctctttgttcatcgcccagggaatggcattggtcggtttaccgtttgtattgcaacatacctaccattactcagtactggaatcggcgtttatctttacgccgtggccggtggcggtcgcaatctgcgccccgctggcgggaagcttgtcaaaccgttttaatccgacgcagatttcaactgtcggggtggttatcttttgtcttggcttaggctcgctggcactgttgccgggcgctgcgacggtgaatgattttctgtggcggaccgccgtttgcggggtggggtatggcttattcctgccgccaaataataaggagatgtttgctaatgtctcagcaaatcgcacggcaacggcctccggggtattatccaccgccaggacgactgggctgtccatcggtgcggcgctggtggcgatggttattgcgctgttgaacggcttaaccggcccaggcggcgcacagtttgccgtttatgtgtttggcctcgcctgcgctattgcggcgatatcctctattgccagtaccttacgcttgcatcgctaaagaaaggaatgccggtagtggtgaaaatgcaaccgctactggcacgttcgattatgagtttttagcatttttacccgtttagcgcgggttcaaaatttttaatatattcagcaaaacagattgttttctttcgttataataaggcacttgaatgcgctgacccccggactggacctgctttctgatgctggaaataaaaaatatcgcctgcctgcgggatgaacgaaccctttttacccacctatcgtttgcggtacaacccggcgagattattcaaatttcaggccccaacggtgcgggaaaaacctcgttattacacctcctgaccgggttatcgacgccagaagaaggggaaattctctggcagggcaaaccgctgcggcgtactcgcgatagctggcacgcgcagctcttgtggctcggtcatcaggtgggggttaaaggggcgctaacggcggacgaaaatctgcgcttttaccatcctgaggcgaccattgaggcgcgctggcaggcgctggcgcaggttgagctggtgggctttgaggatgttccggtagcgcaactctctgccgggcaacagcggcgcgtcgcgctggcgagactatggctcagccgcgcgacgttctggattttagatgaacccttcaccgcgctcgatgcggctggcgtgcaaacgctgaccacccggctggagcagcacgtcggccagggcggtgcggtcatcctgaccacccatcaacccttgcgcccgctctgcgttcctttacgcacgattatgctgagtgacgatgaggcggtcgcggcatgatcaagcagatattctggcgcgacctgcgccttgcctttcgcaattacgccgaaattatcaacccgctgtggtttttcctgattattatcactctgttccccctcagtatcggccccgaaccgcagctgctccggcagattgcgccgggcattgtctgggtggccgcgttactctcttcgctgctggcaatggaccggctgtttcgcgatgactggctggatggctcgctgcagcaactgatgctgatgccggtgccgctgtcgctggtggtgctggcaaaaatcgcggcgcattgggtggtctccgggctgccgctgctgataatctctccgctgatcgctatgttattcggactttcgacggcggagtggcaggtgctggccctgacgctattgatgggcacgccaacgctgagctttattggcgccatcggcgtggggctgaccgtcggcctgcggcgcggcggcgtattgctgagcctgctggtgctgccgctgatgattccgttactgattttcgccaccgccgccgtgggcgcggcgcagatgcagttgccggttgacggctatatggccattcttggcgcctttctggcgggaagcgccaccttaagtccgtttgctaccgcggcggcactcagaattagcgtgcaataattcccgttccctcggggcaatgaggcaaaaaaaatgtggaaagtgttacatcaactcgccattccagagcgcctgtatagcgtatgcggacgattcattccgctgatggctatcctcagcgcgctgtttctggtggtgggctgcgtctggggatttgtctacgccccggcagattatcaacagggtgaaagctatcgcatcatgtatctgcacgtcccggcggcgatgtggtcgatggggatttacggctccatggccgtgaccgcttttgtcggcctggtctggcagatgaaaatggcggataaagcggtgattgcgatggcgctgccaggcgcggtttacacctttattgcgctggtgaccggttccgcgtggggaaaaccgatgtggggaacctggtgggtctgggatgcgcgtctgacatccgaactggtcctgctgtttttatacgtcggggtgattggcctgtatcacgcttttgacgatcgccggctggccgggcgcgccgccgggatactggtgctggttggggtggttaacctgccgattattcattattccgtggagtggtggaacaccctgcatcagggctcgaccaatatgcagaaaaccatcgatccgtcgatgcgcatgccgttgcgtttaaccattttcggtttcttattcctctttattactctgacattaatgcgtatgcgtaatttaattctgttgcaggagcgccgccgcccgtgggtcgtggcgctggctggcgctagtaaacgcgaggagaactcatgaccagcgcttttcactcctggagcgatttctggcagatgggcggctacgccttttatgtctggctggcggttgcagtgacggtcatcgcgctgctgattttgttcatccatacccgctggcagcgccgggcgttgctggcggatgtacgccggcagatggcgcgcgagcggcgggtattggcggcgcgtaagcaaagcacaatgaagggagatgcgttgtgaatcctcggcgtaaagtacgtctctggctcgcctgcggagtgattggggggctggcgctgaccgttggtctggtgatgtatgcattaagctccaatatcgatctcttctataccccaggcgaagtgatatacggcaaacgggaaaatggccagaagccagagccgggacagcgtctacgtatcggcggcatggtgatgcccggcagcgtgaagcgtgacgataaaaccctcgatgtgaccttcaaactctatgatgcccgcggcgtcgtcgaggtgagctataccgggatactgccggcgttgttccgcgaagggcagggggttgtagcccaggggacgctgcaggacgggacgcatatccgcgcgaaggaagtgctggcgaaacacgatgaaaattacacccctccggaagtgaaagaagcgatggaagagaatcatcatccggctgagaagccacagggagccacgcaatgatccctgaaatcggcctcttcctgctgtgcctggcgctgggcatttcctgcctgctggcgctatttccctcctggggcgcgatgcggcaggatgcgcggatgatggcgctggcgaagccgctgtcggtagcgatgtttgccgccatcctcggggcgtttctcattctggtgtacgcctttgtggtgaatgacttcaccgttctgtatgtcgtcagtaactcgaatacgctgctgccggtgtggtatcgcgtagcggcgacctggggggcccacgagggatcgttgctgctgtgggtattgctgatgagcggctggacctgcgcggtcgcggccctgagccgtaatattccgctggaggcctcttcgcgggtactggcggtaatggggatgatctccttctgcttcctggcgtttatcctgctgacctcaaatccgttcgtgcgcacgctacctgatttccccatcgaggggcgcgatctgaacccgatgctgcaggatatcgggctgatcttccacccgccgatgctgtacatgggctatgtgggtttctccgtggccttcgctttcgccattgcgtcgctgatgaccgggcgccttgatagcgcgtgggcgcgctggtcacgcccgtggacgctggcggcgtggagctttctgacggtcggtatcgtgctggggtcggcgtgggcctattatgagctcggctggggcggctggtggttctgggatccggtagaaaacgcctccctgatgccgtggctggcgggaacggcgctgattcactcgctatcggtcaccgaaaagcgcggcagctttaaatcctggaccgtactgctggcgattctggcgttctcgctgtgcctgctgggcactttcctggtgcgttccggggtactgatttccgtacactccttcgcttccgatcctacgcgcggcatgtttattctggcgctgttggtgatcactatcggcggttcgctgctgttattcgccatcaaaggcggcaaggtacgttcccgggtgcgtcacgaactgtggtcgcgcgagtcgctgctgctgggcaacaatgtgctgctgattgccgccatgctggtggtgctgctggggacgctgctgccgctgatacacaagctactggggctaggcagcatttctattggcgagccgttctttaattccctctttattgcgctgatgatcccgttctcgttgctccttggtatcgggccgctggtgcgctggcgtcgcgatgaattccacaagctgcgtaagcggctgctgattgccgcggtggttgccatcgtactggccatcgcactgccgtggctgatgcaggatcgtgttaaagccatgaccgtggttggcctgctgatgtcgctgtgggcattcgtgcttaccgtgatggaagtggtggagcgcgccaccgaccgccaccccttctggcgcgggctgacccgcctcggacgcagccactggggtatggttgccggccatgtggggctggtggtcaccgtcattggcatcgccttcagtcagaattacagcattgaacgcgatgtgcgaatgaagccgggcgatagcgtcgatatccaccagtatcactttgtgttccgtgacgtgcgggatatcaccgggccgaactactttggcggtgaaggggtgatcgaggtttcgcagaatggccatcatgtgagtacgctgcgggcggagaaacgcatttacagcagcagccggatggagatgaccgaagccgccatcgacggcgggctggcgcgcgacctgtacgctgcgctgggtgaagagctggccgacggtagctgggcggtgcgcttgtactataaaccttttgttcgctggatctggttcggcgggatgttaatggcgtttggtggcgtgctgtgcatcctggacccacgttaccgcttacgtaaatcactgccggagaacgcgtgatgaaccgcaaagtcttatatttaccgctggctatcttcctgattctggcggcggcgctgatgtggcaactgatgcgcaatagtgacggcgacgatcctaccgtgcttgaatcagcgctggtgggtaagcctctgccggatttccgcctggcgtcattggaaaaaccggatgtcatgctggatccctctaacattatcaatggtaaaccggtgctgattaacgtctgggccacctggtgccccacctgtcgggcggagcatcagtatttgcgctccctggcggcgcagggcattcgcatcgttggcatcaactataaagacgatcgccagaaagcggtgaactggctgcacgaattgggcaacccgtatgcgctgggagtgtttgacggcgacggtatgctggggctggatcttggcgtgtatggcgcgccggaaactttcctcatcgacggcaaaggcattatccgctaccgccatgccggcgatgtgaacgagcgggtctggcagcaggagattctgccgctgtggaataaatacagccagcaggggggcgcgtgaaatatctgctcatcactttactgacggcgctgctctcgtttcaggcgctggcggcgattgatacctatccatttaaagatgaggcccaggagcagcagttccgccagttgaccgaacagctgcgctgcccgaaatgccagaacaacagtattgccgattcgaactcgatgattgccgccgacatgcgcaaaaaggtctggcaattgatggagcagggacaaagcaatcagcaaatcaccgattacatggtggcgcgctacggcaacttcgtgacctacgaaccgccggtgacccccgcgacgatcatcctctggctgctgccggcttgtttcgttgtgggcggcgcgctggtgatttttcgtttaagccgtcgctcacgggctgaacgcatcagcgagctgagcgcgcaggaacaggaacgcttaaaggcgctgcttgatgacaataaaaggaccctgaaatgattgtcgctttgctcatcatgttggtgttactgctgggaagcgcggcgctgctgtttattccgtggagcggcaggcagcgcgttgaccgcaataccatgaaccatatgatttatcgggcgcgcctgcaggagcttgatgaggatctttcagcggtgaacgcggcgcagcaacagcagctggttgacgatttacgcttgaatttattggaagatttgcccgaatctgccgaaacgaatcacaaaaatagtagttattgggtgtatattcttggggttattatactaacctctttatgcgtaggggtttttatccgaacgagttacatgacccgcgtggttgagtggcagcaagttgtccagcaaacgccgcagttgatgcagcgggtgatggatccacagggtaaaccgttgtcggaagaagagctgtttcgactggcgctgggactacgcacacgcctgcagcaatacccggccgaccagctgagctggacgatgctcggcaggctgcaactggtgctcaataatccaggcgccgcgttacaggcgtttgataaggcgcgacagctggcgccaggcaacgccgatgcgcaactgggatataccgaagcgttacttcactctacggatcccaacgatagccgtgaagcccagcaactgctcgatacgttgctgaagaataaccataacgatgtacgggtgcttagcctggcggcgtttaacgcctttgagcaccagcagtatgacaaagcgatcgcggcgtggcagctaatgctgcaactgttaccggcggatgatgctcagcgagaaattatcattcgtagtattgaccgggctaaaaaagaacaagccgctattctgcaataattaaaataacgtgagtattgctcgaaggcatattggatttgcaatgggttatcgctctgaaatcacaggataatcacccccggctgattatcctggctccgaaaatttccaaaaatttagttggattagaaggtgagtgcaatcgttatagatttatttatataacgattgccatctggcagggacttttgcgtctttcatttaggaaaagggttaaataataagatgagtaaactttcactggaacgctctggtaggcgaaaaattatatttatcgccttgctggttgggatcattattggcgtggtattgctggctggtaccgcgactattatgcataaaaccagcgataccgaattttgtgtgtcatgtcataccatgcagcagcctctggcggaatatcagggcagcgtgcatttccagaacgataaaggtattcgcgccgagtgcgccgattgccacgttcctcatcagccgatcgattatatgctgaccaaaattggcgccctgaaagatgtctggggtgaaatgaccggcaaaatcgacactccggaaaaatacgaggcgcataaactggcgatggcccagagcgtctgggatgggttgaagaagagcgattcggcgacctgccgttcctgccacgactataaagcgatggatattctggcgcaaacccctgaagcccgtaagcagcatccagtggcgatcaaagagggcgaaacctgcatcgactgccataaaggcgtggcgcatattctgccgaacatgagcggcctggcggcggcaggggccagcgagctcgctaacgcggcggcgaaaaccccggcgaccgcgactaccctttacaccattcagacccagccgttctggctgagcgagaaagcaggcgaccataacgacggtaacctgatggcctccactgaagtgaaagtggtgaagcgtgaaggagacatggtgctggcggatgttcatggctggcaacaggatggcgtcaccgaagctttctacgccgcgcgcggcaaacgcattatgagcgcgctgctgggcgaagaagctcgcaaagcgttaaaagtctctggctccgttaccgatgaagagaccaaacaggtctggcatgaagtcgatctgcaggtctggctgccggcgaaaaatctgattggcgatcaacaaaaaatctggagttacgcttctgaattaatggctaacaactgtaccggctgtcatggcctgaccgagttgaatcgctttaacgccaaccagtggattggagtggttaaaggtatgtccggccgtacttcactgactcaggaacaggttcgtctcctgacccagtatgtacaaaaacatgcgagcgacatgccagcagcggccaatcaggacaaacaataaggagccatgatgaaaaagaataacgattatgacatggcggatcagagccaggaacccggtatgaatctgacgcgtcgccgttttctggctggcgccagcgccctgatggcggcgccgctgctggcggggttatggccgcgttcggcgctggcggaggccatcagccaggcgatgccgcagtttatcgcattgcgccaggcggaaagcgggattctcaccggcgcccactggggcgcgtttgaagccatcgtccgcgacggcaaaatggtggacgtacgcccgatcaaagacgatccgtatcccaacgaactgattaccatggcgccgtatcaggttcacgccgaaaaccggattaaatatccgatggtgcgtaaaagctggttagaaggcggggcgaaaaacggtaagccagagctgcgcggccgcgatgagtgggtccgcgtcagctgggataaagctctgcatctggtggcgggtgaaatcagccgtctgcaaaaagagcatggcccatcatctatttatgccggttcttacggctggaaaagcgtcgggatgttccacaacccgagaacgctgctgcagcgcatgatgaacctggcgggcggctttgtcggctattccggtgactactccaccggcgcggcgcaggtgattatgccgcacgtggtcggttccgttgaggtttacgaacagcagaccgcgtggccaaacgtgattgataacagcgagctggtggtgatgatcggttgtaacccaatgatcacgctgaaaaacagctggaacctgccggaccacgtcggccagacaggctttgaagcgctgaagaaaaagggcacccggatgatctgtatcgacccggtgcgcagcgacagcgcgcgtgagttaggcgccgagtggatcgccccgcgcagctacaccgactgcgcgctgatggcgggggtggcccatacgctgctggctgaaaatctgcataaccctgatttcctgaaaacctacaccgtagggttcgataaatttgaagcctacctgaacggtaaagaagatggcgtcgtcaaggatgccgactgggctgcggatatcagcggcgttgatgctgagaccatcaagcagctggcgcgagatatggcgaagcatcgcaccatgatcatgggcggctggggcatccagcgtcagcatcatggcgaacaggcccactggatgatggtgacgctggcggcgatgctggggcagattggcctgcccggcggcggtttcggctttagctatcactactcttccggcggtagcccaaccgcgcgcggcggcattctggcggggatctccgccggtagcccaacgtcgccggcggcgaaagatattacgccgttcccggtggcgcgcatcgccgatgcgctggcgaacccaggcaagaccatcgactataacggcacgaaagtcacctatccggatattaaaatggtgtacgtggcgggcggtaacaccttccaccagcatcaggataccaacaacctggtgaaagcctggcagcatccggaaaccgtggtggtgaacgaaccatactggacggcgacggcaaaacatgccgacatcgtactgccggtgaccaccacctacgagcgcaacgacatggatatgggcggtgactattcgcagctttatgtcttcccgctgcgccagtgcgtaccgccgcagaacgaagcgaaaaacgactttgatgtctttgcggggatttccgagatccttggggtgcacgaggcctttaccgaaggcaaagatgagatgctgtggttgaagggcatgtatgacgagatgaaagcccaggcgcgcaacgctcgcgtggcgctgccgccgtttgatatgttctgggcttccaacaactacattcgcttcccgatcccgcaagagaacacccaatgggtgcgtttcgccgatttccgcgagaacccgctgctcaacccgctggggacgccgtcagggaaaatcgagatctactctgacgccatcgccaaaatgggctacgaggactgtaaagcgattccaacctggatgccgccgcacgagtggtatcgcgggccggaagccgagaaatatccgctgtcgctcaataccggtcacccgattaaccgtctgcactctcagctcgataatacgccgctgcgcaagaaatacgcggtagccgatcgcgaagccatctggatccatccgaaagatgcgagcgcgcgcggcatcagtgaaggcgatctggttcgcgcctttaacgatcgcgggcagatcctggtcggagcggtgattaccgataacgttcgcgaaggcgtggtgcgcatcagcgaaggggcatggtttgatccggccgatccgtcacagccgggatcgctgtgtaaaaacggtaacgtcaactgtctgacctttgacgtgggctcctcgagcctggcgcaggggaactgtggccagatgtcgcagctgcagatcgagaagtacaccggaccggcgctgaaaaacaccgcgcacgatgtgccggtaggcgcgtaacccgcagctgacgtttgaaagacaaaacggacacttctgtgagggagtgtccgttttattgttttatggctttaacgaatcggccaggtaagcgctagtctgcgtaccgtcttcaggaattcgtaggtagtcgtttcccataactcaggcgaaaaatcatatccatatcggcttttgaattcatcatccagcctgtcgctataactctcaatgaaagtatcaatttcttggcctgctggctaattgatagtgacgcacccactgcttttacttgcaccaagcaaagatttgatattttctcgattaagatagattgctctagaaatcacgtcttcgcaacggtttccagaagtgagcgtttctgtcgggtaattcactctcttgatttttcccgcctgtagaccatgctcatttgatacatgcgagaaacaataacgtcatctttagccgaaggcgatacaggtagttggcctttgatatatctaatgatgccccttaacaataagagaccaccatgcttgaactccgtcctaattgcgaatgctgtgataaagatttgcctcctgaatcgaaagaggcatacatctgttcattcgaatgcacattttgcattgattgcgtgacccaacggcttagtggcctgtgcccgaactgcggaggggaactgctgcgacgtccaatacgccccgaagcatctctcctgcgatatcctgcatccagtcagcgtcactataaacagtagagatgaaaactatgtttgctctttgcttataacgtcctaagtgatcctgctagtcgtctgctgagtaccagaaacggttgttaagtattggggctccatcattgtattgctttatgcaactgctgattatggttgctatggcaggcatttttccaccggaaaaaaagccgtaacctaagattacaaggattaccctgggtttgagatgccccttcctgaaagatttcgaagaagaacctttacgcactttcatcatacttctttcaaaactgcatcctaaacgtttatggtgtggattctcctacaattatgaaacagatgttattgatgccgaatgcacaaaagaataaagactgggtcaagcttgcacacacgccagggaaaatagagcgcctggaggcgtatttcagcgggcatggttatgaacctcatcggcacgatacatatgcgatcggcaggacattgtctggtgtgcaacgtttccgttatcgtggcagtaaacaacatagtttacctggtgggacgatggtcttacacccggatgaaattcatgatggagaggcaggaacgctcgagggatttcagtatcggatgttttatatcgagcccgctttaattcagaaaattttaggcggcaaaccgttaccatttattcacagcgggatctcatctgatccccggttatttgccgctaccgggccgcttttaaaagcgccagaagattctattgatacgcttgaagaagaggatgccctttacgatcttgcccagactctggcagtcgtgtcagggcagcgatttcgtcgatgccttgtggattatcagtctgtcgagcgcgctcgcgaatatatacaatctgaattcagccagaacatcacgctggatacgttgtcctccgtctgtggtaaagatcgctggagcctgagccgggattttcgaactcttttcggaacgagtccttatcgctacgtaacaatgcgccgtctcgcatactgtcgacatctgattcagttaggcctgtcacttgcggagtctgcgttggcggcagggttttcagatcaaagtcatatgacacgccagtttataaaagcatatggcatttcaccgggtcgttggcaaacatttattcaaaaacgccgtccctgagttgcacgatcgttcaataccggtaccgcaatattatttatcctcggcgtttcttagccattaaggaatgtcatcatgtactcacctgtaaatctggaacagaagttctctctcttcgatactcactggcagccaaaagtcatcgcgcagatgaacgactaccaattcaaaatcgtgaaaatagcgggcgactttatctggcactcacatccggaaaccgacgaatcctttatcgtagttgagggggttttgcgtattgattttcgtgacgggtatgtccttgtcaagccaggagaaatgtttgttgtacctaaaggtgttgagcataaaacgtcagctgagacgacggtaaaaatgatgatgatagaaccctgtggtgtcaggaataccgggcatgaaggtggggaacgcaccgcagaaaacgatatttggatttaatttggggagattttaagccagccgatcggctggcttaaatagtagaaaacaggtacatcggcttttctcctcactcagctttgcttcatgcctggagcggacgttgctaacctggtgatgtggctttatcggtgcatatcaatatcgctaacattgctaaactcaacgagatatatgcaacctgaatacggagctcttgatggtcaccacacatgttttcatcgcggtcagccttgatggttatatcgcccgacaggatggcgatatcgactggctgttgaagcgcgatgacccgacagaagatcatggctatgccgcatttatcgcagacaaagattggatcattatggggcgaggcagctatgagaaggtgctgacttttgacgaatggccttatgaccgacccgtgctggtgctttcccggcagctaactgatactcccgtgcccgaagcgctgaagggtaaggtgcagttttcatgcttcacgccaggggaggctcttgctcacctgaaggagaaaaacgtgcacagggtatatatcgatggcgggcagttaatacagtcattcctgcgcgaaggcctggttgccgatatcgttatcactaccgttcctgtcctgctcgggtcgggaaaaccgctgttcggagtactgccccatgatatcgatttgactctattatccagccgcagcttcccgtcgggtctggtgcagtcgcactatcggctgatgtcataagctgaatctaagcatagtagcgacctccgccgataaccgctgtggtgattgtgggatcagccgaaaaggatgccatctctacagggatattactgttcctgcaaaaatatctggcctgaatataaacaactcgatattctgaaatgctttgtattttttgtgaacaggaaaaagtatgctgaatacattacccgatttacacagaagttttgcagagcaactcaaacttaaatttcagtctgattcgcgaattcactcccttctcgctggcggctcgattgttcatggcgggtttgataaatactccgatctcgattttgtcgttgtcgtagacactctccactatgacgaaatcatgacgcagcgtagggaacttgccggaacattaggccatctgctccatgcttttaccggggaacatgtcggagagcctcgcctgctaatatgcctgtatggcccagaactacttcatgtcgatctgaaattcgtcactctggaaatgctcactcaacgcgttgaggagccagcagtgttatttacccgtgataacactgctctgcagcgacaactggcaaaatttagtgcttactggcctgacatgacgccggagtggtttgagtcccgagcctggatctggctgcattatgcagtggttaagttgggaaggggcgaactcttcgaagcgattggtatgctgtcattcttccgcgagcaggtgctggggccaatgctgtaccgtcgtgccaatcttccgcaacgtggggttcgccgcattgaattccacggcattgaccctgatggcctgctgacttccacgctggcaacgcacgatcgtgactccgtcagcatcgccatcagaatggctgttgacgcttatatcaatctgcgagctgatgctctgcctgagaatatcgcagatgatgcggctcgttgggcggttcttgcgatgctgaaagcgtattctgacagggcttaaacctgtactccggtcgcttacacggccggagtaaaagtaccagcgatctaaatcccaggattggctgtcgcagtttagttactacaatcccatgctaaagccaggttcaggtgtcaagagtaaggttcgctatctaaaaacgtgacctgcctgtatgcgatatttacaccatcaccaccatcatagagaacgtagcccgcttctttgggtttggctgattcgatttctttaactgagagaggtttggtttgtcttggcattgccgagtttccatagttttaggcacctcaaaaacaataaagctttatgaggtgcctaacaaggtgcctaaaaggttcggatttaattagttcagttaggacttcgcgggacaatttgagggcacaaaaaagcccgaagagaagcgcgtcaagattaagcaccgcctcaattacagcacgtaatcaccgatggagaattttggtgctggcggagtctgaattggttgtataactcattgtttaatggctgataaccttcagttcaattttcaatttggtcccattgttggtcctaaaagaaaatgtcaggttttttcgggggaggggaggttacagctggagtctcttcatctgtgagattagcactttgctttcctttagtctgctctgtatctaagcgattatttcacggtagtttttagcaggccggtcgagcgccttgccatcagaatatctactacggaaatatacggggtctgttcttgccatgaaaatcctttccggtcgatacggacaagcccgtatttttctaccagaaagttcaccgcatcgctgagcgatactcctgcatcaatatgttcccgtatggtggtttcataactgaacggtgtgtcattcagcgtcaggccatagtgctccgataaaagatgagtcagcagccgttgccaggtttcaacgggtgacagatagggctgagtcgcccttgtcgggtgtaatgataaggtttgcatgatgtttgctctatgagtttaagagataagcgtagagttaatgggggtcaagctagtcgggataaatagcgatgtagacgtaaccacaagagccgagtgtatcggcttcgcaagtcagtccattgtgatatagcgtgatgcggtgctgatggcgggaggtgagctcaccggaaacgagcatcaactccagctgtttaagcaataccggaaacgcctggtcgagatggcgtaaatccgcgtcgctgaatgtcccggtgatactggcacgatcagccaggtaatgcagccggttgccttcctgcaccagtcgtgcgccaaagtacggcgtgacggtggttttgagtccccaccagggttcggcaatatcgtggtttactgccggtatttcattcgacaatttagctttccttaaattaacgttaattgagcgtgacgctgcgcaggacgacatacggaccgttgcggtcctgacggcgctccgcgaagactgcgagcacaccgctgatatcctgcacctcccgcccggcatagtggcagacgctgccggaccactggtatttgccggtgcagaagcgaaacagccgggactgtggatgctggcggtatatcgccattgcctggcgcttgctgataattttcatcgggttacttttctcctgtgctacagccagcctcgctctgcaaacgaaacgatttccatcccgcccaccaccaagtggtccagcaggcggatatcgaccagttccagcgcctgtttaagacgggacgtaatctgtctgtcagcataactgggctctgcctcccctgacgggtggttatgtgccagaacggcagctgcagcgttgtgcttcagaccggcctttacgacctcgcgcggatgaacggtgatagtgttgatggtgcccataaacagcgtgtcgtgggctatcaggcgatgctgattgtcaagccacaggactgagagagcttccctctccagaggcgcgagatgcaggcgcagccagtcgcgaacggcatggcttgaggtaaatgacgcaccgggttcgcgtagctggcattccagcaggattaacgctttcctgaccgtctgctggtcggcgggggttaattcacaagcaaataacggtaactgttgttccatagcggctgacctcagtcgatgatgtgcatgatggcgctgcattccgcgtggttaagcgcgtagtcccgcaggcgatagtagtgctccgtcatggcgtcgcattcgctgcgcatagcgtgatggctgtaagtcatcagacagacggcaattccggcagcttctgcactgacttcgccgccgttgccgttcatggtgttaaatagcgaccacttctcatcggtatctccatttgtttccggagccataaacgcaccgccgttactcagtgtgtaaaaattccagatacccccgctgtagtctgcgcagaagcggtccatccaggcgaagatgtgcggctccagggttatccactgcggtatgctgccgaagtgctgcggccagaagctgatgcgctgctcgtcctgtacgagggtggcggtcagcgctggcgaagaactggcaggttgtggcggtaacgggagggtatcgttaaggttaataatgtcggtcatgctggtttttccttgtttatttatcggattggggatgctggttaagccggagtgacgggcaggactgcgcatagccatcctcatcacagcgtgacggccagtggccctgagggagacttaagctgcacaggctgcgttcaccgggacgataaagaaggtgcgagcaccaggcgcagaggtcgtcgtcagagatggagctgctgctgggattgttttccagggcggtcagataaaggggggcctgatgggtgttatcaggtagtggtggcatcagctcagcgcctgctgcagttcttccgccattacccagagggctcggttgagcttaacgtcgccgtcgatacctttaactgcacgggtatggctgcgtttgcctctggcagtacgtcctggcagcccccctttcagcaggttctcctggcaacgattgaaaactgaccacaggtcgtcctgacggtcttcatagcgtcggggcgtcagtatctgggatgctgttaccggctggtgctcttcaccaaagcggtacgtcagggcggctcttgcaaacgcctgctgtgccgggggcgggagtaaaagcgactccatggcaccacgtttttcttccaccttgtcaaatatccccagtacttcataagcgccttcaatgactttctccaccacgttaccccggtgcggaactctgatttcgccaaacgactgtccgcagacgagcgaattcgtgcagacgcttcggaatattcctggtaacagctgaaaactggattcgccaccgtgcgaattgaggatgatgatttcaggcacctgctggccgttaatctgaccggcgcgacgcaggcggagcatatgctttgtgtgctcccgacggtccggatcccgaacgcgtgactgacaggcaaagaatggctggaacccttcgcgctgcagattctccagcagggtgatggtgggaataaacgtgtacttttcactcctggaagcatgtttgttctctccgaagacgctgggaacatgctgcatgagctcttcaggtgttaagggacgatcgcggcgtatctggtttatccgcccgaagcggcttgctaagcgcatggtgagtacctctgtagttaatgaaacggcataaacaaaaaagccatgtaccccgaagggaacatggccggttggtgtggtcggggcctgaggtgagtcaggagtgggaaattccgtggctggcgatgtggcggttaagccattccccggcgctggcttcaaaactccacgcccgccagatcaacttcccctcgctatcccgaatcaccagccgaaaatgcgtaccctggtcgtcttcgatagcaacactgaggtaaaccgccaccacagcctccgcctgttcacgggtgaacgaaccgggaggtaacggtgagtcgtcaatgttttgcatggtgagttccttagcaggcacaaaaacaaacgccctgctcattcgagcagggcgttagcgggtttaatgagagtattaagagcagtgcgtgtatcagtgattttcgagagcgagggttttcgctttaccactgacatagcggatattcagcgttgtgacgccagcctttatggagggtttcaggtctgcaatttcatcgcatcccatcccggtgatttcccggatttctgggttttcacgggttttgctgacgacataccagttaccggcagggcaggcagtgcctccgtcctgcttcagcagggtgaggaacgatgaatcaataagctgagtatataatccggcctcgtcagcacctttaatcagcgtatctttctctttaccgccgcagttacggcaaaagagcctgtcgtcctgtgaacgcagaatctgggctgtataagccggtgcttcattatccagcgagaaggtattacgttctccgttcttccagataacgctgagcagcgtgacgccatttttctctgttaccgatacacttctggcgctgctcaggtttgagcggtcattatcgaactgaatgctgctgatggcaggcgttgccgcaagtttatcaatgtagaaaaaatcaggcgtctgattcgccgccgctcccggggaactgtcagacatcagaatggcatagcggcttgtatcctggattttgctgtagctggcggtctttattttatatccctgggggtaatccgccagaaaataactgtcctttttctccggcccgcaaagatggcagaccatatgcccttcgctgtcggttgtcagacggggaagattgtcagccggagcggcggtagccggttgggtaaacatcaggtacagggacgctatcatcagtccggtgacgcggatgattttttgtctgttaatcataaagttgtccgtaaatgttaataaaaaatagcgttgtctggcggaaagagaaccttttcattccgccatgcattcagcagcagcctgaccggtgtaagcaataaaatcaggcgaggtaaaagtccgggcgggattcccccagtcttgaccgtaacgctgaacgagtttctcccaggcacagtcacacagggcggtatcaccctgtgcggtgcattcgcgcataaaggcacgttttcccccgggctcatcacaggcggttaacagcaggagggaggcaagaaaaagccctttgtgtttcatcatcacgatttacgcataaacaaaccgaggatgagcaggaacacgatgatgattatccagatgagcccgccgataatgctgccgagtgaagggaaccagactgcgggccataccagcccctgtccgattgcataagccaggccacgccatacctgaggcccccatacagcctgataaatggccgtgatgagagccagcacacaatagatactgataataaaacgtttcattcatgactccatttgaacaataaatagcgctggtggcgggagaggaaacggctgttgataaggggggctgatttagtcactgacggtgaaggtgccttggtctgtgaatatccgggcctccaggaaattacacgagataccggtctgccagagtggatttccgaaacgccaggtcagactctcggcaaactgcattttgcggggggtaaacgtacctttattgggccaccatccttccggggtggtcttgccgttatacgttgtctttcccttcttcagttgcgggcaacgcccccggttaacatcaattttgtctatctgaatgttgtctgttctggcggtcacggtgacataaacgcagtcatggcattcgtagccacttttctcgatattgacttttatagcgtcctcatcagccgcctgagcgggcatcgcggccagtacagcaagggtggcgaacgcgataagaacagttttcatggcactttctccgtatgtgacaaatcctgcgatatatcgcattgatttttaatggataaataacataaccctatgattcccggttgattatgtaatcacgggattcatcaggtacaacgatgaatttcgatcggctcgatcgacaaaatcgatcgtcattgagcacaaaaacttatcgatacacgtcttcaggtttatcgaaaatgaagaggttaacagaagaaaaatccccagagggagcctgctgcacgggcgacggtgtgggtcaccgcatgcagtgctgtgcgggctatctgcggcagcggtgcgaggtcaatgatgttatcaatcacctctaccacggcatcgccaaagctgctgctggcggtattgataacggtatcagtgcgataccggttctgaagatgaggcacaagtggactgcgggcttgctttgggaggcgggtaatcatggcctccaccaggcgcgacagccggtaatgcccccggacagagactggcagaatatctatttctgctatctgcaactgacgtgccacagcctgctgtttctgcgcaatacgctccgcctgtaacgccgagggctgagccgacaaccatcgccactgctcggcgggttcggttttgtccacctggttgagtatccacagcaccggcggcagcggtccactgaactgcgcgaatacgtcctgataaaactgctcttccaccgcaaatgctcggtcatcagccttgagcacccacagcaccatatcgagctgaggcatgaggtcacgatacagctcacggtattcaccgtcgcgggtaacagactcgcccacgccgggcaagtcgaccagcgtcagataattgctaccgaagcgcagccggacacgctgtggctgacgggtgcaggcttccaccgcgttcacggcgcagacttcgctacggaacagtgcattacacaaactgctcttcccgacaccggttttgcccataatgccaatcacgggttcatacgtgacgagacggttaagctcctggataaggtgctggcgcagtgcgtacggataacgccggagatgacgacggataagggcatagcccgagggatgtttcatatcggcctctgaatgaaaaaggccatccggtggggatgacctgctggaaataaacgggaggaaattcactgaggtgatatataactgagatttatttaaaaaacacaccaacctcatattaactggcagtgtatagccagaacggcagtattcacatgcttttttgtttatctactaaagaaagtgtcgataaatgaaatttccggaagttgccacttaactaatttagtccaacgctgtcggattagactaaatatcagtttttcatattgacttgcgatcgcattacagattagttttcaattatcaaaaaacattttctggaggtattgtcatgcaggagtttccatttaacgctttccccacgtcattacttgaaactatttttgatattgaggaatgcacacaggccccggcggaaatgattgcattaacattgctgagtggattatcactggcatgtcagagcctgattaaggtgaaaataacagacaccatgaagtctccggtatcattgtattcattcgtgatagcagattctggcgagagaaaaacagcggtggaaaaactgcttttcaaaccttttcatgagcatgatctgcgtgtattactccagtatgaagagcagaagaaagaacatgaggtccagtctaaaatatggagcaagaaagaaaatgctcttctgaaatgcattgataaatacacgatgaaaggaatatgtacagatgaactttcacggcaattagagaagttatccgctgaaaagccagtaccaccgaaagccagaaggtacatgtattacaatgtcacccctgaagctctgcagtttgaaatgtatacccactcgccacaaacaggactcataactgatgagggggctaatatacttagcagacggaccatgagtgatttggggtttatgaactccatgtgggatgatgaaaattttcatgtcaatcggaaaacaggaccgagttttacgattgagaatggacgtattacgttgttagtcatggtacagaaagcaatattcgatgattatttaaaacgccatggagaaaatgcacgcgggagtggtttgtttgcacgctgttttatcttgtatattgatacgaaattatcgacacagggccagcgttttattagtcgtcaatcttcccctcagtcaggtgagctggagaatcttaatcacttctaccagcgtatgaatgaactggtagaaaaaagtgcttctcaacacgggaccgggcatcagacatatttatcattcgagccctccgccctggaggcatggaaagaaattcatgatgaaatagaaagtggtattggccccgacagggaatatgcaaacatgaatgattttgcatccaaacttccgaataatgttgcacgtctggccgcgcttctgagttactataccgaaggtgaatgcgcgataaaaaaagaatatgttgaaaatgcctggttgctgtgtgaatggtacatgcaacaggcgataaaggtttttggggctcaggagggctaccacgaggcgctgctattatcatggctgcgtcgtgagttcaatgaaacagatatgaatcatgtcagatttaatacaatacgaaatgccgggcctaatgtattacgtaaaggtaagttactggaaagagtcattgagagacttgaaaaggaaggcgcgatagacatcgtccgctcaagacgcaaggcacgaatggtttatgcaggccgtcattttcgtaacaatccatttacaaaaaatgccgcgtataagcactactggccgcgatagttgcgactgatcgcaactaatcgcgaggttagcctgtggaaatgcgcaaaattgttgaaaactaatatcagagtaaaattattatctggcttgccatttttcatgagatttactcaggcggagggcttattgttatattttcactaatgaatttactgtcggtatagtaatacatgtttattattaatacatccactctctattcagattaattattattaatatgctaatacattatacccatacagtaagttaattataacgcaacacactttgattatgtaacaccatacggttaatgattactatccgataatgttcatgtacatacctgcatgtaacattaccacgatgattaatcgtatggttacttatcctttcttatctcaatcttacacattgagtgaactatttattcaggtgtttatatgccaaataattccttgaatgctgattaccagcaggcattttacgatgttattcgtaatgcagtagacgagtttccgcgtacgttagcactacgagttgatttacgttttccccgcaactatcagtatggagattcgaataaagaggttacgcgttttattgaatcactgaaagctaagttgctggtcgattgccaacgtaagaaccgacgctggaaacgtaaccgatctaatagattacggtatgcatgggtacgtgaagtcggtgaacttaaccgccgtaagcattaccatgtattgctgttactgaataaagatttctatcacggtgtcgggagttataatgccgatgacagtttatacgcattaatccagcaggcatggtgcagtgcgttaggtctggattcggggcaatactctggtttagcgaatatgactgagaacggttgtttttatttaaacagaaaatccgctaattatatgcaagaagttaccaaattactgaagcgcatggagtatatggctaaagaccacaccaagagctatgacgatggatatcgatcaattggaatgagccggaggtaatcaacattcatctggaagaactgacagtcttcagtagaggactgattctgtcagttgtttcattatcatctggtctggcgttttttgggcttgagcactctctcgaatgctgatttgacgtcaggatcgttacgtgaccagtccataatagttcgctctcttaacgcaaaaagctcagcttcattcttggacttattatttttatctgtggctgagggccagccgtgtatcgctatatagtcattaatctcatcttcaatatctcggagagcatcctgcttgtgtaaccacccttcaggtgaagattttacatgcaaaagcctaataatttcatttttcaccggttcaaagcgtgcagctttctcttttccacccttcaccggaacatccgtttttttagcttgctgctgttgccacaattcgtgttctacaatgccacggcagtaatcaaggttttcaatacctatgagtatgcactgtatcgcttcattctgattcgagttaaggagcccaagtcccagataccagttaacgtcagcgagaaaacaaaactcatctacagtttcgcgaatcgtgcccggatcatcaaatcccaacctgtaaacttgttcatcaaacttacggcggactgccgagttattaagcatgctgtcaaccagagattgtacaaactcattatattcatttgcacctgaagcctcttcttcctgttcccagccaatatccttgagcgcccgagataatgctgaactcttgttgttgaacgtagttttcaattcaacgataaaatcatcaaaactaaaattgtccataattcagtcagttaaacttcgtaaaaaatgaggtattgcagccgtatgttgtacagttgccgcagcagatagtctggcttccatccaaagcaaaccaagagaggaagcattttaatggaaccaaagtctgtaaaaatcctgcgtgtacctgcacttgtcaagaagttaggcattgggcgttcaacggtatacgactggcttgaccctaattcagatcgtcatgatccgacatttccccaaagggtgaaactgggagcaaagacggtaggttggctagaatccgagattgatgcttggatcttgaacaaagcaaaacaaccgctaacgccagtttcgccatagtttggaagattatatgggatagagtgaggaccgcactcttcccattggttttaattctatctccgcatgtgcagccatagtttcagataaaaaaacagattgctgataccgctgtaccaggcactgcatgcctatcccaaaacctgtgccgtattgccgattagtagctgacgttattacgacaaagccggaggaaataacgggactatacccacagcggtacgctggcggcatcctgaccccttaccgttacgtctcaaaatgccatcaataacagtttgatgcagggtcataccctttctctcagtgcagagggcgcgttcacaaacaacgggacgctcaccaccggtgacgacaggggacctgctgatgcaggcggaaaataacattaccgtcacggaaaatcagattaattcggcctatatcacatcgggttttggtgcgaagcgggataccggtcagtcttctgccggtgcgcagggcagcatcatcacggcaggaggaaatcttgtccagatggtgggaaacaatctgaccgtgacgacctcttctgtctctgcaggagaaaacgccctgctctctgccggaaatgatctcagtctgaatgcggctgcaacacatcagacacagagtgaccggacccgtgaaacacacaccaccggcgctgtcgtttccacggtggccgatggggataatctcacactgtcctccggacgggatatttccagtcaggcggcgaagatcgtggctgaaaacaatatcaccctgcaggcggggcgtgatgtgaacctgctggcagaggccagcaccgaagacaacagcaatatctcaggagattaacgagtccgtccgccagcagggcattgagattgccagcggttgttcaaatgcctgaaggccatgaggtttattcatacagagttctcagcgtgaaaaataaaaatccccgcgatccggtatgggattgcgggggattcacgaagataatatccatctgaaattattaggaatcaaagtgggtaggcagatttacgaaatgtggcttcaaaaggattaatacagaatcacgtttgagccagagataactattagattggatctaaattatcttttttggcaatagcgaaaaatgattcctctggcacattgtcttaaggaaagtgttgatattattgtaattgtggagtaatgaatcagtaatcatcgcttcgcttcattgttagaaactcgtcgagttctacgtatccgtaacaaagtatgcaattaatgtccgttcaccgtgagtcgagaggggctaccgatatattaaaatattttggatgaagccctccacacggaccttttagcgtgacttatatgattttgtaatataaggatatttatgtatttaggtagcctaaaaatttcgcggtttcgatcttgtgatgatgtgaccgttagtctccgcccagatttaactgtattggttggtgaaaataatggtggaaagtccaatgtcgtagacgcaatcagattgcttactttgccgttgagtggacgccgcgaacgatatccagaagatgaggatgtacgacgctattcgacagtcccaagttttcaaatcgaaggggctttccaaggcctaagcgatactctaaaaggtctattgatatcagcagttcccgatcctaccaagagcgaggctaccttcggctatcgatatgaatcgcgttctgaacatgctccccgtggtaagactaccgtgtgggctggacgcttcgacactaatggaccagagcttggttcttctgagttgatcagacacgtttatctccctcctttaagggacgcacatcaggtgctgggtactagcagcggcactagagtgatggcattgctgcgtaatttcttgccaaaagagcgggagcaggatttcctcgctggtgtcaggcgtgcggataatcggcctgagatcttaactacaatcaatacggatatcagtgctgctctcggactactcactaatggagtacgtccgcagatagcggcattggattttggtagcgaaaccttactcgatgtagctcgtgatttgagatttcgtatggccgatacaggtttgataccagaagatattcggtcttctggtctggggtactcaaatttactctatatggccactgttgttgtagagttgactaaggccaaagaggcagacctcacgattttccttgttgaagaacctgaagcgcatttgcatccgcaattacaggtacttgtgcttgagttcctcttggatcaagcgcgccaatcagcatcacgtatcattgaaccaggaaagcctgaaggccgcatccaaattgttgtgacaacccattcccccaacctgacagcatgggtttctccacgccacctagtggtcatgcgttcgcggcatcgtgaacaagatggaatatccatctcagaatcagtgagtgtgcccattgccgaaataggtctaaagccaaagacattagataaaattagccgatatcttgacgtgactcgttccgctttgctgtttggtaacagagctatcttggtggaagggatcgcggaagcactattgttgcccgtgctagcacaaaagcttgtgctagccgatgatttagatgggtggcttaggttcaagggggctgtaattgtgcctatcgaaggtgtggacttccgtccatatgttgaggtactgctacggccatatggtgatgcacgtattgctgatcggctgatagtgatcactgatgcggacccaaccgtgttgggaaataggaaagttgatctggaaaatctggctgcaacgcatggagctccagatgctctgatcgtgctaaccaatcagcatacattggagcacgaaatttttggcgctggaaatgaaagtttcctgaaaagcgtgtttcttcgtttgcatcgtaattcacgtagagactgggaagcgcagatagaggccattccagaacaagatcgccccaatgcatttcttaaattaattgaggcgaaaaagactcgtaaaggcgatttggcgcaagctatggcttcgcgcattgaggcgggtgaaccatttgttgtacctccttatctcattgatgcaattcgtggagcttcacgtatatgactggcatccacaatctaaccccagagcaagaaacatttgctgcccacattggcggagctttcgttaatgcttgtcctggagccggaaaaacacgcactatcattgctcggctagcgaggatcgccgctacgttgcctcctcgtcagggcatagcgatactttcattcacaaactccgctgtagacgagtttcgcgaacgatgcctggctgctgggctcgatacgcttttgcaatatcctagtttcatgggaacacttgatgctttcgtcagacatttcgttgtactaccaagctgtgcggtatcaaaccagatacgaccaatcatccttgatagttgggatactcttggcatagaaattcgtttatcaggtcaatttgcctttcgaggtgaaccggtaagcctcgatttgtttgatccagaaaccaatattattgttcctgataggatcggacatgtaggtttgcaaaatcatgtccgtcaacatcagcttcgataccaacaagcagcagcacatcggcgaagatctttgttacaagctggctatatgagtgcaggagatgcacgtgctcaaacattgcggttgattagagataatgtaattggtggggcacttgctcgcgcattagcggcacgttttcaagaagttatggttgatgaagggcaagattgcaatccacttgatctacaaatactgacatggctcagagcacatggggtaaatgttacgttcgtctgtgatcctgaccaagcaatctacgaatttcgtaatggtaatcctcaaggaatacaggtatttaaggatacatatcctattgcgtcacataaggagttgacgggtaattttcgtagtagtcccgcaatttgccagttagcggcctctttaaggcgagaaggtcaggttgatcggtcgcttggtgaaagtgcgaatgttgactatccaattttacttcttacctacggtggccggggtccaacggcaatgattggtcagatattccttgaacggattacggaactgggactggactcaaccaaggcgattattttggctcactcaggcaaagttgcgttacgcgcagctggtgtcacttccagcaattcaatcggaaactcgcgaattgagacgctggctcgtcaagtgtcaacgttctggtcacctgccgcaaccccaaaaacgaaggagaatgtagtccagtcagtcgaaatattattgctggatttaatgggtgtgcgtcaaccaaatgagcatctgattaaagccatagagcgtcttggtatggaccggcgtgcccatcggagatgcgccctaagtttcctcattaaccttccaaaaacgtgtagagattcggatgaagagcggcttgcctggatagcctgtgttcacgcggaaatggagaggttgcatctgccactccaggctggtgtaagcgtacgtcgtttcttccgacagccacctaatgcgcattggtcaaagcatcttcaagtgcccgcagctctcggttttgcatgtggcaatatacatgaagtgaaaggtcgtgagtacgatgccgtatgcgtcgtagtcccgccaaatcgagctcctgaaaacagagttgaagcactcttcgagtcatggcaagcgcgagtagatgctgaggcaaagcgtgtactttacgttggcttaacccgtgctcgtaattttgttgctcttgcgataccaaacgcctttgcagggcgctgtgtggatttgctggctacacgccaagtgccctatacaagagtggatttgtgaaccagaaaccaatagttttcatatcctattgatataaattaatttcaaatggatttttcactatgtggcatgacaacgagacaactgtcgattatttaaattttggtgttgttgctgatgcatgtgcaagcctgctgaagcaggctaatggggaacctatttctataggcgtctcaggtggctggggagcaggtaaatcttctctggtgaaaatgattgcatcacgcttggaaggcccttcatcagaagagtcgtgtagggaggaaaacaatctagaaaagcattcatttgtcgtgctcacttttaatccatggctttaccaagattttgagtccgccaggagtgcattgttacaaattgtgggagacgagattgttcggcttactgatgaaaataaaactatcgccgacaaagtatctgaactgtggcgaaggataaatcttctccgagtcgctcaattaagtggtgaagctgcattgactttaactactggcattcctatcggttctcttggaaaaaccgttagtaaattggctggttggtttacgtcggatgacaaatcgagcaatgaatcatcagatacagatagtctcgagctaagtgccagcggtcttctaaaaccgagtgagccattttcgatgccagcccatattcaggcattcagggatactttagagagtattctcgaagagttgaaaatcacgttagtaatatttgtggatgatttagacagatgtttgccacaaacagcaatttcaacacttgaatcaattcgtttgttgctatttattcgccgtagcgctttcgttattgctgcagataatgatttcataaaagctgcagtgaaggttcactttgatggcgctggaattacgggtgatgttgcaactaactatttcgataaattaatacaagttccactccatgttcctcgccttggtttgaatgaggcaaaagcgtatctggtgcttttgttgcttgagcgagaaaccaacgcaggccatttcagtaaggaaaggttcaatcatgctcttagcgttatccctgagaaactgcgtaatagttggaaaggtgaaacgataaatcaagagtttttatatgaattagtagagcatgttaatgcactcaaaagtttaatggatttagcccaaggtcttgcggctcttcttcatagctctttagcagtaaacgctaatccccggctaatgaaaagatttttaaatactgtttatttgcgtgatgctctttctgcgccacagggaataacgttagatatagccgcactggcaaaatggcatctccttgaaaggtgcgacgaaagccttgctgaggaacttgctagtcgtgttcattcggataatgacggtagggtacaagttttggcggatgctgaagctgctgcagcgggtcagagtagtttacctgagcctttcaagaatacgccatttactcagcaatggctccaactcctgccagccttgggaaccgaggatctacgcccgcttctccacctcagccgcgactctggaactcgtgacttcggtgatgacaatatgactcctgattctagaaaattgagagacgcactgaaagttgcaactaatggtcatgagtccttagttgaacttatgaggaaaataggaccttcgcagacagagttggcgatgacgaaggcctggcagagcaatagtgcctcacgtacctggaagagtagcaaagaaattgtaatgctgattgagtgctgcaaggtttacccggaaattgggaataaagcggtcagcttgttggatcaggctcctctgaaacttattggcccaggtttaatcccaactcttggtgctcagccatgggcacagcaacttttagaacgatggaaagatcttaacgaattaccaaaaacaactaggaatgcaattgggaaccttgggaggaggcgctaatgggaacatcaacttctagtgggggaggccgcgcaggctcaccgtttgatcctgaatggttaaaacctgaaagtggctctaccacaggtggaggagattcgcctgattcaccatcggaggagaacggtggaaatgtagttcctgatggtgcaatagcaccagaacgacggtttggacctgctcgttcgctacttgggggatatctgcaaaatggcagccacgataatttacgtggtgcgacaaaaagcatggtctccaaaggaatggggggcgcgcgacgagcagccgctactatgcgaggtgttgccagtggtgtcggtagtcttggtgagttcctgacgtctgttagggatagaaacgaccaacgagtgattgattggcttactcacgttcgtcaagagaacctttcggcaacagatcttactcttgaaattttgaaagaggttattcctgggacaggaagcgttgatgacgaatcgctccgtaatgctggcgcggaggctatggcgcaactctatgagctttatccggacgtggacatatttaatctcacagatgtgcaaatagctgaagtcatggggttgaccattgcgaatgagatttgtaatcgaatagatctccagcttggacagacttacgaaaaattaaaatatgatcctttattaattcaggaacggcgttctgatattcgcgaatgggtcggtgctgaggttagagtggtattggaaaaacaaactacaaaaaatacagaaccgaaaagcttggctcagtctattctcttgtctgccttagaggtattttcagaatgattaaagttatgtgtgctaaagcagaactgattccagcacaggttcctgctgatgggcgagtattctcctattttaaaggcgctaagcgtgcaggtgttggtacaattgcgaatcgatggcatggtgcattaaaacggagtgggtttcgaccttcaacagagatttgggattttgtacaattttgcctcgcggtatgtagcgcggatctatcaagccctagaagaacaagtgcagatggctggactcggaatattcaacttacggttggattgtgcgatccagataaatggctaccgctgaaatctgatcttgaagatatgctaaaagttctgactggcgattattggttattaaatttcaataatgcaggcatggaacctcctcaaggagacggcgcttttctcagcaatgactgcgtgtctttattatcgggtggactagatagtctaataggtgggattgatttggtagctaaaggccaaaaacctctatttgtttctcagctcgcacataaagattcagagcgacagagggcatacgcggctatgctgatgggaaatggctcacattatcaatggagtcatggtatcagcttcaaaggatcgcgcgaaccttctacacgtggtcgttcattagctttttatgcatttgcactgcttgcttcaacgaaaatcaacctaccgaaaccaacaatatttatccccgaaaatggggtgatctccattaatcctcctttggttccagggcgtgtatctagtttgagtactcgaacaacgcatcctatgtttatcgatatgttgcaaagagttctggatactttgggtattaatgtgcagtttcaattgccttaccgttttaaaactaaaggcgaaatgatgcgggaatgtcttgaccaagacctcttgcaaaaatgggctgctgattctacaagttgtggccgttttagaacttataatcgtcagcactgtggacgctgtgttccatgcttgatccgtcgggctgcattccttgcatggaaacctgagggggatacaacgtcttaccgctttgggtctgttgttggcagtgacaaatcaagtgcacccgatgatcctatggctgttgcacttgccatccttgatgtaaggaagagagggcttgacagatttcttggtggctcgttggcttttgcaccgattaacgagcgccctatgtaccgtagagttttgcaagaaggtataaaagagctagaaactgtactcattcaggataaattgctttgattgattttcactgtcacgttgatttgtatcccaaggctagagatgtttatgctggtgcgattgagcgtaatgttttcacttggttagttactacgagcccaaaggcttttcaggctacaagtcatgttttagaaaaacatgaatcggtaatgatcagtcctggacttcatcctgaaattgtcgctgatcgtttccaggaattggaaatgcttctcgagttgattcaaaacgtagctgctgtaggtgagattggattggatggttcaaaacgatattccaccagttacgcgatgcaacgtcgagtgttttccgaggcggtcaggaagtgccacgaggttgggggacgagcaatgagcattcattcaagacaggccgttccggatgtgctagctaccttaaaagcgttcccctctcacggaattcctattttacattggttcactggaagtgttacggaattgagggatgcttcagcacagggatgctggttcagtattggtccggctgctttcaactctgccgcagggaaagctctagctactaagctccctaaagacaaggttgtgccagagagcgacgggccatttgctcaatttgacaatcgaactgtgatgccatgggatttcaatattacagttagattgctgggtaaggcgtggtcaatgcctgaaaatgatgtaaagctacaattgttaagcaatacgaaaatgttgcttggacagatcggaggcaatcgaattgctctcaacttctaaagaaatggtattgaatcaccacgagtttaacatacatcttctatgccggatggtgtaaaccgaatgccgtttgtaggcaaaacaagtagtcgctacttactcgcctcgtaatccataaggggaactggcaacgagagcgatatcaccgatgagtttttctggggtatcattattgtatgcatttgatcgccaacactaagcttgctggattttgattctacaaaaggagagtgtgatggaatctgctcgcgataaacgcactggagagattgttgaggctgaggatctctggttgctggatagcgttgatactgaaggctacgtgtgctggggatgtggtataaccatgtatcctgctgcatgggaaaaagataaaaaagtcagagcctattttaaaaagaaacgccatatccaccatcgtcatgaatgtgatgctgatgctgaaagcacagtaattcgccaaggccagaaggcgagtgtccgcaacatactggacagtgctccgggtttaatgccctcgggattaaagttgatcgaaaaacgcccggttgttgaacccggtttctctggtgatgaaagtaaatccagttcgacacgttcagcatcctcacgatctggtgaaggtaattcacctgaacgacaatcccggcgtcaagtgaatgctattcgcaatatttgccgtgccttcatccgtttcccacatgaccgtggaatgtcgcttaacgttcctggtatcagtggtcaaatctacatgacagcgtttaaaaagctccggaatgaggttcaaccttacccggagccgaagatcttttatgcaccactgctctggaataaatttactgaaaatgatgaaaacctcatcattccactatctggtgaatggggtgaggataagtcaggtaaacctaaacccacccgaagctaccagatatacatcgattgggctggctggtcaaaagccaagcgtaccgtggttcgcaaagatctggaggccgcccggacagaggcgatagaagccaaaggaaaagggctgaaagataaagcttgggtcttctttatcggcgagcaaagtgcggataatccggagatcttctacgttagcgattatcgactcatctgcgcgattgtagggcatatcacttatccatgacgtgaaaaggccttcccgagtgggaaggcctgctcatatggctatttgtgactaccgccgaaattccgttcaccttcttcgtaaattttactatcgagttttgtcaggtagtccagacgatggaccacttctccaaaatcatagatataatttgctgattttcgatccaggatatacctgcagttttctggaaaatgaaccagcccaggatagtcctctggtacgagccctaatgcactgtaccaagctctgacgatcatcatcctcaagctagtgtcgatattataatctcccagcctgttgtaagcttgttcgttaaatatcaggcaaacgtggaagtggcatttacctgcctgacctgctccccatccgctaaaactaaccgcagtaacaacttacgcttttgaccaaaactatcggttgtttctaaccgatttcgacccaaagtcacatgtggataatttaaagactcattgtgatttgacttgacagtagctgtcaaatgagtttgagttaccacagtttattgtgctattcaagagtggctatcgatgtcgaaaagtggtcactctttctggatgcttgcaattttcgattagggccgcgagataattatcctcatgttcatcaggaaagagctcgtgcgacgataaacgttcagactccggcagttcgaaatcgattcgaatcgcgccaacaagatataagcctgcaagattaagtgcgtacggacctgatcggcagattacacatgattgcctcttcggtcgaagtggctgtagaccatgaagaactcgatcgtgtgtatacaccgccatttcattttgtttatgcttaaacaagtacaggatggacttcgaaccgttacttccgacgaattggtaatgatcattgccagaattgggagcaaaacgatgactcgcaaaaaacattgccactcgcaaatcactgcttaaatccaaatacggcgaaaacagtccatagtgctgcagtagagtattaagtaggtcagccagattgttatccatgcccatattcaaatccaatcgaacgcggccaaagagactcaccaaaggatcatctgaatcctccatatcttgtgctgaatatatccactcaccccgttttctcagttcatttattcgccgatccacttcctcaatgtcgaattgtgaatagataatcttcgaccactcatacaagttaagaccattaaaatgatgaaatgatcgctgatgattctgcaggagatttcgccaaatagaaggaataaaagaggtctcaccaagcccttcgataagaaagtatggatttctgattgggcgagtaatctcgtaatgcataatctgcccacgaaacaataggttttcccctagggactcttggattttgttaacctgcctcgttaattcgtcgtatgactttactgtttttaaaaaaatatctctgcaggatgtcttaccggactttgccatctggtaccattcaggaaaatgatttttgtgaattcgtgtggcaagatccgagctggctagaggtccgccatagtaacgatctataattatatcaccatctatattcacatatcctgacgagattagtgcttcggcttctgcagtttggatcccaaggtcagaataaatctgtcgagtcttttctaaatttggggggtaaaaattgtttggccaatcgaagtcattactgtagtaattccaatagttattataattcgccatgagtttcttattttccaatagttagctaatattaaagccgatatataaaaccgttttatattttagagaaagcttccgaataatctttattatcaccaatgtatgtacttgtcaactaaatatggccgccgagttagatttttcaagtaatggttctccgatttgtttagtagttatttgacccaacgttatattcatgcagccatagaacgctgtaatacctcacgataagtgaatcgccacggatatttagacatgtccttgccagcgcgattacgctagtatggttccccccatgtagccaatttgtcagaggtcgggtcaatacctttctgaacatataaatctgaaccgatattttctagtaacttgttcctcaaggaaacatcaacccggccaagtaaggatatattgtcaatatgttctgagccacacttgcagtcttcctcatgaataacacgttcccaacagccgttactatcgattcgatagtgcatcccatagaagcgaccaatactcatgatacgcaaccctggatgatcgataccatattcaaatacacatacaatattttcaggcatttttactattccaacgcccttcccatatcttgtgtccataccatggtaaataagtccatcaagttcaattgatatctcattatacttttctaatagcttattgatttcaggaagaacaaaacaagggtcacttacaccatgatacagggcgcttccacatagaatctgaactatttgtgaagagataatggccaaaccgtccggaggcggaaggtccctagtccaaaagggtctatacattgcacttctagaaggcatgcgcttttgaaggtgacaggaatactcaggtaactccaatgacctcttgaacgcctcaagaccttcatccgaaaggtgtcgcatcttcacccatggcattgccaaaagttcgcgataaacaggatcctcacatggttctggaaatagccagccaacactatatccctccacatatttacgcagaacctctgctggagcgctgatatgacaaataatacagtctccatctaacccttcacgaattaaaggccccaccatgtacgcatcctgtcgcacatatcttggagcgccatgatctgtcgcaatttcggatagatgaacagcctgaagattgtattgtcgtagtaacttctggcttattaaataaatgtggccaatatcttcggatggagcgaaacaagcatttagagtacgcaaccaaactggatcttcaaagcaatcctctaccaaattgaccacatacttagaatcaaatttattacatgcaaaccaagctgcaacacgtggatcgccactaacatcaaggaaaaaggaacgaaacccataatgctgaaggattgcttggttggttgcattatcgccggtatcattccaaccgcgtactaagtgttgcaaggctctctttgcataataggtccacataatcatcaaatcgggtacgcacccttgacgctgaaatgacgtgggcattgagggcgagccatctgaagataggtaatgttgagtttgtcctctgtggagaactcctggcccatattgtttaataactattttgagttcttcgagcgtctcgcaatgacaatgttccatcccacctctccattccaactttaatagttgaataaatgctcttgactaaaatttagtgtgccattatacctattcgtctaccattatcccttgataggtacaacctcgtcggatagaagcttcttggattgtaagttttggacccaactcaatctgtagcgcatttattctaagaccaaaaaaatcaaaatgctgaagatcagtttttaattcttcaataaatacggatttataagcatttgcatcaaacccttggaataacactccagcattatccaatgcagtaaaaactctagaaacagcagaattgaatatcggcaacaagtccaaatacacttgctttttggggtatcgatctactttcgttttttcccacactttttcaaaggccaagccattttccagagagacgaatctggataaagcatttgctttacccattgggtttaagtagtccgattcgctgcgtggatctaagcgactataaacatcttctaactttatcaaatgcatcatcaacggaggattgccacctgtcgttcgatgcctagcaattaaatattcagccccaagtagacgctcaggtttcccatccaaccaaatagtctggagaaggctatggaatagaggatgatcacggtgatgaagagcatttcgaattgaaattaagaggctagtctcaggatgctcatggaagtcaaatatcgcttgtgatacatcatataacgtatgaaaaccctcaagattttgctcaaatgctcgatctaggttgtggatagcctcttcacggtcgattgctaccaattctcggtatcttaaaaatgcttccccatagagtcgcatattgttggcaaaacgcccaagagcattagtaataattgatacatcgcccatatcaaccctcagcatcttagtatttatagactcttcttgtgagtcctcggttggattgcataatcatataatggcgtactgaacatagctatcaatagcgcagggaatgtccgctcctggcacaaaccagactgtcagattcgatggcgatctattccaggacaggtttgagccaatgcaccttgccgggaaaacaccagtccagctcaaaattcagcccacaagttttaaccccgttttcccagtttcaacaatgctccctctgtcggccttgctaacaaaatcagcccaccactgcatcataggtcgccgttgctcaagatagtcactgcggttgtaagctcgacgtacctcatttttgtctacatgagccagtgctgcttcaatgacatcaggcggaaatccttcctcattgagtgccgtactagcgatagaacgtaaaccgtgtgatacgagtacgcctcctaagccagcacgtttgagcgctgcattcactgtttggctattcatcggctgggttggtttgatgcgactgggaaagataaactcccggccaccactgagtgacttcatcaattccagaatagtgagagctccatcagataatggaactgtatggtcccgattcatcttcattcgagctgctggaattttccattcgttagcatcaaaatcgatctcatcccatcgagcttcagcagcttcggcagggcgtgtaatggtgagaagctgccacatgaacaggcatcgtgtggacaggctgatacttgccgtgcgcatagtctgcattagttgtggtagttgatccgggcggatactaggcatgtttttcttctgcggtttctcgaacgctttccctatgtttacgctgggaactgcatcaatcaagcctgtgttctgcgcataaatcatgacttcattaatacgctgacaaaggcggcgaacagtctctaatgcacctcttgcctgtaccggctgaactgctttaaccagagtatgagccttaatctcagtgacactgatatccccgattgccgggaaaacatctctctcaagcgagcgccagatatcgtcggcatagtcctctgttacgctggctttcttcacattccaccaacgttcggcgactagcaagaaagtgttggttttggcctcttgtgaatttctgacctgttctttctgatgctcctgcggatcaatatctttcgccaataaaactttagattcggctctgagtttacgtgcatcagaaagcgagacggcagggtaggcaccgaagctctgtttggttctctgcttggttagaggccgatagtaacggaattgccagagtttactaccgctggacttgattagcagagtaagcccatcaccatcatacagctggtaatcggtatctttaggtttggcggctttaatttccgtatcggttaacggcttggtttttcttgccatggggaatctccatgcgtttaggcccaacgaaaacagtagagcttttcgttgggcctatcaatgggcctaaaaggttcggatttaattagttctcttcggacttcgcgggacaaattgagggcacaaaaaagcccgcagggcttgcgccgtgcgggctcttaggacttcatcggatgactctggtaatcaccgatggagaattttggtggagctggcgggagttgaacccgcatccgaaagttttcaactcaatgaaattaaagaattttattcttaaagatatttacgcgtgaactttacgtatcctttgaagtaccggcatggccggctaaagtcctaatcttctttggcgctttaatcttcgttggattatccgttactggaattttaagcagatcgctgaagaacatagcctcagaacctttgtaccgatcttgagcactataatttataccgtacattaaagactgtgtttttttatacatatctctaatttcaggtgtattgtcgtacgatacaatccacggcgtttttatgtcagattgaacaacctttgctacattcacatgatcttcgtggttgtaatgattgatatataacccttttcctttgacatagtacggagggtctaaataagttattgaattttctggtaattctgtaattatattattgataaactcgatagcatctagattaaaaagctcaattcgatccttttcggcatgaatgattcttatgcgagaaattaggtcgtttttattatatctagcatctaatttccattcgccatcttgattttttccaccaataaccccgccctttaatattccggagcgattggttctattaaggaaaaatgtagagaaaccaattgttagcaggtcataactatttgtgttatttattatttccttttgtttataccactcatccatagtgaccggtgtatcgtagatcatagagcataaagtatcagcattgttaagaacagaatgccagaatgcataaacggaaacgtttatatcgttaaggataattctttcagcaatatttagatctagcagtttcaatgcaagacccgcgcctccagcataaggctcagcataatgtataggcgaaagattattctcctcaataacatttagcatgaagtttgataatttgcctttaccgccgggatagcgaagtggggtattgaaccgcataagatacctctggaaacctagtgatcattatatcaaaaaaacgggctttatggccatcagataaagcccattaatatcaattagttatcagagaggtaagagtggattacggctgagtcaacgccgtgacctgtggtcattactatcttgaggcttttggtgaaatcatatttatattggtcggatatagcgctattcttggtgacccagtacctatatggattgttcttgactggtccatctaccatacttctgaactcgggtgtatgcgcaaaatctttaaagagtttacgtattacacctaaaataccttgcttcccttttttaaattcatcgatttcatttgatatgtttattggtgccttccctaattttagagtggttactatatcagtggcaattctgttgaagactggttttgtgaaacgatttctattttcccaataatcatcatcgggtggcaggttatataaaaactcaaatatcatttggtcaggagggagtaaatggggaagaaggcataggtttttttctttttttgctttttttgcattatctccattatcatttgcaacatcaccatctaagacaatcagacttttgacggtgaattcggggatttttctggccatcaaatcaagaattgcactgcagcttatatttatattacctagtgggttgatgattttgtttatttttctgtcaataattaattgtttgaaaaaatcaaatccttctcgatcttcaaaatagacattggccttaggtaagtttaagtcttcgtcaattttaacagtttgaacgtgaaggtcagcgttaatatctggccaagataaattatttcttgttttgatatcaccataggtatctgttaagtaaattgttttgaatgatttctcgtcttgttttgatctattatagatatcttctatgattagcggtgagtgcgaagtcataatgatttgcaaattatattgctttgctgctttggttagtatttttattagttcgaattgagccgcagggaataaaccagcatcagcttcatcaattaaaagaatgccaccatgataatctgggtaggtttcctttaatcgtttaaatgaaaaaatagcttgaattatttgtccaacattatcttcccctacagatactgactcatgatcataattgtcactatgtacaaccatggaatcaataaccccttttgtggctgttaccgtactccctgtggtttttaataataattgattgttcataactcttatttcttcagagttatcattaatatattgaacatcccttgtcgcataatcggtacgtaaagtaatagggagtaatcttgccaagcttagaaaaataacaggatgagttacattacggctctggtttgcacctggaattccatcattaccacggacgacaggtcgagcttttgctctatcggtatagccatacagacctaaagtaagcttgtctaaatgtttattgacattagcatcatataaatgaatcttaacatccatagagccagcagtatcatattcttcagataatctaaaatgctcattgaatgctgacttaaagcttctgtttgttaatgtcttatagttctttaagttcgttactggatctgttgattggtctcttgaaaagctaaaaatttgtgcgacgataccaagtatcgtcgactttgatgtgccatttttcccacaaataacagttaacttactgccgaaatcaatatttacgtcttttagacctctaaattttataacctgaagtttattcaacttagttatctgatttgccatgcttgtcccttatacctgaagtggccacaagttgtggccaataatttgtaaattatctttctaacgccttgttgctcgtttgtccatcgtattccttcagatatgagccataatgcctaaacaacatctccggtcctttatgccccatctgccccgctagccagaagagattgacgccttgactgatgtgacgtgtagcaaaagtatgtcgtgtctggtatgggttgcggtatctaatcccggctttacgtagtgtgggaacccaggctttttttcgtatcgcatctgcacttgcccatgctttattactttttggatcttcgaagatcgtatcatctttcataaaagtgaacggtttctgactaactagcgcgagcattgcttcgtcagtcagttcaaccttccgtgttccagctttggttttggtccctttgattacgccaactacactggcattctggacgtgggctgtcttccctacaaaatcgatatcacgccaacgaagagcacacagttcagaactacgcatgccagtttggatggcgaatcggaagaggttctcccattgtttattgccagcagctgtgagcaaagcacgtacttcggctggtgatagcgggtcaaccacataactactttctgacactgatttgtcactctggtaccgcgaagctgttactagtgacacagggttgatctgaagtacaccatctgtcactgcctcatccaatgcagaacgcaggaacgaaagttggtttctgatggtcttcaatgtcgttttctggctttggatccatgtcttcaatgttgctggggttaactcacttgctggaaacatatgaagtgaagacaaagcgcttcggcatttcttgtacccgccaattgtcgaaggtgatagcttccttgtttcgcagatcaccagatactcgtccaagtacatcttcaccgttttgcctgcggaagcgttgccgaaaattttcaaccgggttgagtgggggaagtattccgcatagacaaacgtccccctttcgatcttgttatagatttcgccgagtgtgcgctcggcgtatttgatatttttgggggttacgtccagattagaaagaggctcacggcatttaacccctttataagtgaaggtaatattgatggtttcaccattacgatgtttcctgatggttacgccgcgtgggagtttaggcgattctgtcgagcccattttgcaacctcactaagatctatccatctttccttaacgccgtcgaccttcagcacttgaaccccttcacgccatactccgcgctgcacgcgtttgtttatggcatccggagtttcgccagtctctttgcaataagttgagatgggaacacaatcgaggctcagcatagatttctccactgcccggctgcacccgggcgattagggttattattcgtcgcttgaaggcaatagtttctgccagattgccgatacatattttgcttgatggcgggcatcggctaatgcgttgtgggctacaccatcaaatggcatattacgtttgggatcgaaaccaagttgtttaccgagcagcaccatggtacgcacgtcgctgtcgttccagaattgccacgggcaggtttggccggcgcggtcgtaggctgagcgtaaaatcacgttgtcgaagttggcaccattgccccagactttcaagtaacgcgggttgtcagagttgcggctgatgaatgaactgagtccggagagcgcttccgcgatgtgcttggtatcgtcagtacaaatagctgcacgggcctctgatgattgtttgagccaccacaggatagtgtcaccgtccggagtcgctccctgatccatagcgctggcgaggttgacagccacatagaactctgcgcccagctctccagtttgtggttcaaagaacacagcaccgattgtgacgattggagcagcaggcttattacccatagtttcgaggtcgaccattaaatggttcacgttaatttttctcctgtttctgcgctgcagctaacatagccgacagcgctgtgttctggtccattgcctctgtaagggcgacaaaggtcacatccagccttgacgctatgtcttgcatcaattgggctgctgctggtggtagacccggtgcagcagcatacgctgcagcaaccaattctttcactttcacgtgtgccattaacgccgctccattagctggttaaagcgattcatgaacatgccgtaagactggcccgggcggacgggattaatcacaaactggtcggtaggaataacgccgtcgagcatcggccagtgggtgccgtcgtcgatctcaaagtcgcgacgttcgctggccagcatcaccaggtcggcatatttaacggtcgggtgctgctcagccggcaggccgaatttttggcgaatagctgcatcaacctgatcttcaatggcgcggtagtcaggaaggaggcgtttcaatggggcagggatatcttgcaaatatgcctcggcggcgtcatgcagcagcgcttcaagcgcaaattcctgaggcaccagatagctcgttaaaacactgtgctgcccaacgctataaaactcaggcaggtggccagcgaaacggcagatattcgagagggcattagcgatatcttctatctcgatggcatcttgctggatatcgagatagttaaaatgtttacctgcaaaggtttgaataaagctcatttttttctccatactttacgcctgcacagcgctgaattgtgggtgtaggaatccctcgccaggtggcgattaattacaggattacgcttcaataaatacccgcagctgcgggtatttaaggctgagcaataaggctttgaattaggctttgaagttgccgataaaggtttacaccggcttgtcgtcaaactgagcaatcaacaaatcgcggaattcattagccatttcttcttcctgcgcttcgagttgaacgatccgcagcacaaacactggttcgccacttttaagcaggctgttacgaagactaaagcggcgttcgcctaggccttcataagggatgcatttaaattcgaaagcgaccggcattacatctttgctgctcgcttctacactttgcatcagcgattttctaccagcgaaatcactatcttcgtggtcggcctgattagtctgctggatagtcacccgacgaacagcctgtgcagctttggagatatccatggtttgcccttcagcatcgaaagcgagcaagaaatcgctccagtcttcgagccattcggcaatttgtttctggctcaggcgatcgccattgattgcgagcaacgcccggaaaggtgctgtttttttgaggcggatagacgctacgttgtctgcatgtccgggttcgcccagggaaccgatgttaaacactgcacgggctgacatactctctgcgtcgatgaaacagcgggctggggtatcaataacggcatagccaactgaataacgaacgaaatcggcaatgctggttgtttccagggcaccacggaagcggaaccggttgaggttaaagcgctccaggctttcgataccgtacccggacggcaacataaccgtggggcatatggtagttttcagctcctgtgtgtggaccgcagcaagagttagctcctgaattttctcgatagcgtcgccgtttaattgtgacataggttttccttaatgacttacggttaaagaacaggtcggtcgcgacttatttagccgcccgtagctttccatcaggatcgccagcgaggttaaacaggttgccctgatcttcctgcaggatcgtgagcttcccacctttgttgacccacattggtgtttcggtggtgtcctcttcggacgctttgccgcgtggggtagggcagagtcatccgatgaagtcctaagagcccgcacggcgcaacagaattgcttgatgtccacaatgaccactttacacaggtaataaaaaacctgccggagcaggttagagccatagttgatgttgttgcactcgcgtcggatgcggcggggctggatctacttcacccggcttaacgataaatcgtgccagagtttcatgggtcatgaatgtacaaccacaattaatgttttggcactggtgatagcgttcctttgtttccgtacttaagtagcgactggtgcgcgcatgggcggcactttgacataacggacagtgcatcataattcaccccttaaattattaaatcttgagggagatgataaacctgaattttacatttgcaagttacaggttgcatttttattgttcggtggattcatattcaacgtcggatagcctaacctcaagctctaagctcgtcgtgtagccgtttccattgatactatgcgtcactttactaatcaaccacgattgctcgtctatgacgcgcttaaagcccataacccgcacaggcgtctcagggtaaagatctgcgcggcctatcgccagcgtaattgaaaactcagcaacgcctcgctgcagcttatcccacttagcctgagcggctcgcatcgcctgcgctttcgatgcgtagaccgtcgtcagcgccagcacgttatcggcctcaccggccatatactcaccctcgcgggcttcctgctcttttttggcctttgtctttttgctgaccggctttgctttcggatgctccagcgcgcgcaggtgcttctcttttggtttgcgtttcaatgtcactttttgcttttgcggcttcgggtctttggtgtgcaaccatttcgcggttacgccggtgtatgcccctcggtcggcaatggcaaactgatgacggtcaccatcgctgcgggtcagcgtcatttgtgggacgggcttaccactggccgtcaccgcgctaccggctttcagaaacagcaatttccccgctttcactgacactgccgccccgttgcggtcggccagtctggtcaggaataccgcgtcggattcctgcgactggtcgatatgcggtaccgggatttttttcagcggctccgcgacactggccgtcagtttgttacgctttgcgatggtgctgaccagttcgccgagggtggtatcgtgccaggattcctcacgccgtgaattgagcgttccgcgaaagtctgcgctacgcgcccggatggtcagggtatctggcgcccctcggtgctcaatctcatcgaccgtgaaatcgcctttattcagcaatgccgaaccctcccagccaagccacaacgtcagcaccgccccgcgcaggggtaactcgactttgccgtcagtatcgtcgagctcgatatcgagctggtcggcctcaaatccccgattgtctgtcatggtgagagatatcagtcggtcgctaaaattgctggtaatgtcctgactattcagcgtcagcataaatgccggtgcgagactggtaccggcatcaatggtcatgcccgtcatcatacggccagccctccgagtgtaccctgcagcttatcggccagattaccggcagagccgagaagctcaccggcctgtttattcaggtcgccaaacattgccgtcagtgactcatcgacccgcttcagtgaaagcgtgaaatcaatctttctggcctcaccatcgctgaaaaactcggcgtgtgtggttgataccttgtcgacaatatacattccgaggatattgccggttccctcaatcagcggccacgctctgccctcgtcggccatcaactcgacggcctgcagtgaaatacgaccgccggtaatagcggggtaaagcgtgccggcaagttggatcgaggtttcaccctcgccgagaaactgatacgcaggcggtttgcctacccggtcgttagacgcccagcgataatccttcgagtgctgcatcgactgataaggcagggtgcggcgttcaaatacaaacatgccgagagcaagcatcatcgtttaattctcccttagtcgtggctcatgctggcgcgctggcgcgcacgtttttcgcgctcaatttgttcgagcgtgtcgcgtagctggcggtcgagttgatgacccggcgcgacaccgcccggtagcgtaatgttgtattcgcttttgctctggtcgatgtaagagcgtcccgccggtgcggtaacaggctgataagcctgatacccgccataggtgctggtcgccggtatgtaggaattcccctgcgtggcggcgttggttttggcggcggtctggtcgaggctgtccgattctttgttgatgatgccgagcttttcgagaagccagtcgacaccgctgcgtagcttattgaaaacgtttagtggtgccatcagcgctgaggccagcgcctgaccgaaaataacgccagcatttttacagctatcgagcgtctcctgcgtagctttgaccggtgcaatcaggtctttaaaccattgccatacgccgcgcagtttctcaccgaggccgtcaaaaataggtgccagtggagcgaacatttccccaactggcgcaaaggcactcatgatgccctctatcactcctgagaaaaatgcgctgatgggctcccaatatttacggataagtagcgccccggccacaatcgccgccccgacggccacaatcggccaggtgattgcaccgagcgcggttacaatggcactaccggcaacagtcaaggccgtacccatcacgccagcggcggcaatgatggcattaatccccatgactaccggccacgcaacgagaccaatgccgccgatgacaccaataagagccagcgcgccaccggcaataatgccgatggtttccgccagccctttatttttctggatccagccgtcgagctttaacacgtattttgttgcggtctgagtgagtttgcgcagtgagccctcttgctggtcaaaaaggtcggtaccgacagcctcataagcagactgaaattctttaaagtcgccgccgaggttatcctgcatcaccttgaccagttcctcggtttttccgtctgatgctttcagcgcggcggtgagctggtcaagtttgccgcttgaggcagcttccatcagtaccgccgccgccgagctggcctcctcgccgaaaatggttttcatgtactcgccgcgctggcttgtccctaggttgtttttctcaaagctgcgctgcatttctttcaggatggagaatatcgggcgcgtgttccccttgctgtcggatgttttgacgctgagctccttaatggcttcaaacgcttttccggtgggagcctgcaggcggctaaggatggcgcggctccccgtacccgccattgacccggtaattttggcgtcgtgcagcgcaccgaccattgcggcggtttgctcaatgctcaccccggcatttttcgctaccggcgcggcataggtcagcgcgtcgttcagtccgtcaaaatcggcggcggttttattcatgaccgtagacagtacgtcaccaatatgcgcaaccttgtcattggaaagctgaaacgcagagcgcatccccatcaacagtgcggcgttttcttccattgtgcgacggttagcaagcgccatattcagcgtgactggcgttgttgcctgaatcgctgcggcatcaccaccaccttttgcgataataatctgcgcgctggcggcatcatcggcagaggcggcagtgttgtcgccgagctggcgcgcctgtttgcgtagcgcctgcatttctggcgactgtttgtcgaccccgagtacggcctgcagctcggaatttttctgcgcaaagtcataaccgggcatcagcaatttaaccccggccatcgttcccgccgtggcaacacctaccccggcagcacctgcagcggccatgttaccggcaagctccttaccagatttatatcgctcctgtacccggtttagttttgcctgctgcgcactgacgcgcgccagtgcctcacgctggcggttaagctgcgccgtcgtttcgctaatggaggttttgagccgacgctcatcggccgacagggtgcgggtattgataccggcctgcatcagttctgagcgctgtcgctgtaccgatgttcgcaggctgttgtatttcgtctgcagctcagaggcggcacgtttcgccgcttcgagcgcctgcgcctgcgcgcgggtcggattagtcgtgtttttaaactgcacggccagctcaccggcttcgcgtttggctttttcaagtgactgactggtcacggccagttgcgcactggccttgcgaaagccgtcgattttcgacgcctgcgcgttcagggtgcgcaggtctttttgtgtatcgcgaatatcgcccgacagggttttacttgccgtctggatagattttagcggtcgggtcgcctgatctaccgctttcagcaatacctcaattctcaggttattactcattgtggtttccgctacgcagtagcgccttttcgcgccatgtgatgagctcggtcaggctcagggaatagagttctgatggcggccagtggaaaatcactgcgatatccgccatcaggtcatcggtcgacaggtcgggcggaaaatctatcccaccgaagccggtgacaaaaaaccaatcaccttgccagcgagctgcatcaaatctggtgcgtttattgcggtaagttcctgggtcgtcagggctggataggtcatgcgtggcagcactttaatcagtgcgtcaacctcagattgtgccagcgccgccagactgacaccgcgcagggttccggcagttggtttaatcagagtgaccttatggattgtctgaccggcgcgcttgattggctcatcaagagtcacgacattcgggttatcggtgtcaatttcattgccagtcgtatcaacaaattcaggttttttacgtggtgcttttgccatgatgtttttctctgctcagaaagggattaataaccggccagcagtgctgaccggtcaggagattacagcccgattgcgcggcggtgctgttccagacggtcgacgccgttcaccttctcgaccatgttgacggtgtcgatttcgataacgtcgctaccatcaattgtgaggcggtagtaggtgcagacggtcgacagtttggtcgaggtgttttcaccctgtttattctcgccgccgtcgatttctttatgacggccacgcatgaccacctcaacggccacgatttcgccggtgtcgtcacgctggtatgagccagcaaaacgcagcggcacagcatcggcacccggcgcggcatactgcgcaaagagcgccacatcaggcaggccaccgacagaccactcgacggtaagcgcatcgtcatcgagaccgaggtcaatcgccgccgcgccgttcatgccgccgccgcgatagttttcgagcttacgggtcagtttcggcagcgtcacggattcaacaacgcccatgtagctcaggccgtcattgaacatgttcaaatatttgagtttgcggggtagtgccatgttgtttcaggctccttagctgttgaccgattcggccagattgaccagatatttatcggtaatacgctggcgcagggtcaggctttccagcgggggaaccggcgtatagtcgtaatcgatatacagtttcccgcctttcaggctctctttatcgttcgattcctcatcgaaccagcattcaccatccacgatgtagccattcgatttcagctcgcggaatttggcgttaatgccgtcaacaatgtcgcggataagcgatgcggtgatgggtttatcgaccgcccacatgtgcgcctcggccatcgtgtcggccagtacctgcgcggtgcgggtgtagttctcaaacaggaaaagcgggtcatcagagcaggtgcggttaccccagaagcggaaaccatctttgcgcaccagtgttgtgaccccggcctcgttgagcaggtcagcatcagtgccggatgcctgcaaatcccagaagacagacgcgctgatgccggtgacgccctgtacgcccacgttagacagggttttgtgccagccgatggtctggtcgatataggcgcgcaggccgagcgcgcgcgcggtggcgtaggctgttgcggtggcgttcgtggtggtgtcccacgcaaggaagtcaggccagataaccatcagctcacgctgactgaaattctcgcggtatttgatggcatcagaaagggttttacagcccaatgcactgacgtaaccaaacgcacgcaggctgatacacaccgaggcgagtgcggttgcgacttcctgcgtatcgagacccggcacgccgagaatacgtggcttgacgccggtgaccgcctcggcggttaacagtgccttgatgccggtgtatttaccgttctcatccgtgccgccgatgatgtttgaaatggtctgcgcttcggcgtcctctccggtaccttcggcaacacgcacgacgacggtgacgggttttgactggtcggcgatggcctgcagtgaggttgccagcgtgccttgtttaccggctttcgcaatagcgctctgcacattggtaatcagcaccggctcgttgagggggaatgttgcgctatccgcatcgctggccgtgcagaccataccgacgacagcggtcgcaacggtggaaatgacgcgggtgccgtcgttaatttcaagcacctgcacgccgtggtgaaaatcactcatccgggtaactccgtggttagtgggtgagtaatattttctgttgtgcggtgggggcgggctatgtaatggcgatggctggctgatggtacaaaagaagggcataaaaaagacgggcatcagcccgccttgcattattccggcttgaccggccactcgatatccggcgcaccctcggtgcttaccgcctgaatgtccttaatgtaattcatccagagaatcaggctggccttatcatcatcactgatgatgccgagctgcagctctgtttgccacccggtgatttgctgctgcgcctcagaaagcagagcctgcttttgctgttctgcgacggcaatttcatcagcatgttgcgccgccgtgtcggtcacccactggttaccgtcccatttatcatacgccgtgacaggtgccagtaacgtcagcgtatccggcaattcgccgagaaaagcgatgatttccggttgcccggtctcagtgctgtaagccgttaaaccgcgataatccgcaatagtttcccattgtttttcatccgcgctgcgcaccagtgcaaagccatcacccggtaatgctggcttatcggcataactgaaagcaggcaagcccacacccgcggctaaatattccatcgtcaccgcctgaaattcgcgctgctgaggctccacgttgtacaccgtgagccagccagcaacggtggcaatgccgcttttattcagttttgccgtaggtaaatcagtgttgtatttgttcattatgctgctctcacaatgtagttaaatgcaatgttgcgtgggcgggtttctgagctaccagcttcaccggtatacatagcgccgcccacgccggaattagaaagctcagcaccggcagtcactggcatcttgattccggcgtcaacggatttatatgtaccgagcgtgtggctatgtttttttatcatgtcgtcctgccatgccagtaaagacctgccaggatccacgccgcgtccgttgtcccacccgcgaataaattcaccgcgcaggtcaggtaatttgccggagggatatgccgatgccagatagggatacatcgccttatcgaaggtggcaccattacagataagccagcccagcggggcagtcaccagcggccacgggtgcggaataccgacaggggcgtcttcccgcacaatagcgccaacgtctgcggcggtcggcttatttgcctgagaatacaactcataccagtcaccccagcccgtcgtccttgttctgacccataccctgttagcgatgctacccgacgtaccatatccataaagtcgttgaatcagcctgtacccgttatccccgctacctgactgccacgtcatcacctcaacaaataccgtaccggcgttattagcaggctccggggcattgagtggatttgtcagcacaaatacgccctgagtgagaagactattcagatcctttccggtttcagccgctaaagcaggagcaataccataggatgacaaaccgatattttgctgcgctgagagctgcgcggcggtgccggcacttttaatctcactcagattgccggtttttgacagtcggttattagcattatcgtttgctgctttaacggcttttggcgtggcggccagcgcctcgctggtactgtttgttgcactactgagctgcacaaaaccttttgcggctgtagtcgcatcaggatgattgcgggacttttcatgttgagcaagcacatcatcgacatatgatttaacttcaataacctgctcatcgacatactgacgggttgccagcacgaccgacgggtcgatttttagcgtgatggccgtcgtgctggagacaatcagaatcatgcgaatggtctgcgtgcggccgctcccctccgccagtttcggcttgtaggtttcggggcagttcgccacggcaatcaacacgccatcatcatcatagagaccaatctcgcggatccagaaaccaccttcattttcgggaataatttgttccgcgataatctggctgacattggccgggtcaacggtcagcatattgagcggcgcgatgcgctgctggttgataagcgctgtttgtgccgggtctggcgtcggtaatttgccgttggcatctcccacggccatttgcgtcaggttcagcttagtgccgagtgcggtcgcgttcgccagccgtgccgcgccctgattggtcagaatggcataatattttgctgtcatgcgttcactctcaggttatcaatcaaatgaatagccgaggccggataaataccgccaccgacaataatttcttcgggcaaataggggtaaaccgtcagcgcatcaccgtgatagcaggccgcgccgacatacagctcgccggttgagctcagactgatagccagcccggtcaggtggcggcttgccggtttggcgtcttcaatcaggcgctcaagctcctgatacatttcctcagtgataccgctatcgagcacaccaacaacgaggcggaatgtgcctggctcctcgttgagcttccaccactcgcgcacctcaatcagatagccgagcggctcaaccacccggcgcaatgcgctgatggtgcctttgtgctgatggacaaaaaacgaggaggcacaaacactgcgctttgtcgcctccggccacgtctcatcccaccggtcaaccgacagcgcccacgccagataaggcagcagattgaccgggcaggtgcgccagttccataacgtgcgcaacggtaccggcacgcgctgaatctcagcgagcgcggcagcggcggcaacttccagcggcgacgagccgacgggtaacagtcggtcactcatctgagcccccgatagttatccggtgctcggtacagttcgacgcctgcgacttactcagcacgatatcggcctgcggtgatgccagttcgacacgctgcaccccttcgacatgcagcgcggcataaatggctgacagccggatatcgcgcccgagacggtgctgcgcgctgatgtagctctgcagcttctgctctgatgcctgcctgatgggctcagattcgggaccggggtaaacgtagagcgtcgcgtcaatctggtacggcacaatctccgctgactggacggtcaccctgtcggccaccgggcgaacatcctcagcgttcagcgccttatcaacaatcgccagcaggtcagcgctggcggtaccgtcgccctcgcgggataacacggtaatcgtcacgcaggctggcgacgggctttcgaccgagacgtcagcgacccgcccgtcggcgctgcggccgtgatattcataggcgccgaccggacccgccacgctcaatccctcaaatgcctgttgcgtgcgcaggcgcaggtcggtgtcggattccataacggcaggcgtcggcgggatggtggtgtcatctgccggtgtgatggtgaggcgctcggtattattgtttccggccacgacgtcgaggtcgttaccggttgaatacgccagcgtcaccgcctgcgcggcttcgttcacccgctgacgccagataacctcacggtaggcgttttcctgcagcagcttaacaatcggctctgactcaagcgtcagcgtccgggcgatggcctcctgctggtcttcgggataaagtgaaatcagcgtcgcaatgcgttccgcaaggatggtttcataatccagcacctcaaccacatcggggataggtaactgactcaggtcaacagttgccatagtgatttaactcagtgaaagggtggtagaaactgacgcgccggtatcggttcgcgccccggtaatatcgacatacatttcgccagcctcgccggtctcaaaactgatggcggtcaggcgtatgcgtggctcccacttctggatcgccgaataacacgccaccatgatttgcagcctcagcgcggagttttgcggcatatcaatcagcaccgacagaagcgagccatattcacgacgcatcacccgcgagccgaccggcgtcagcagaatatcgcgcatgctctcgctgatgtgctcaatgtcactgatagcaaggccggtattgcggttcataccctgatagcgcgccgtcatttggtgccctccgtccagctaccgcctttttgcacgccgccgtgaccgtggtcatccacctgcacgccatttgatttaaatgtcccgtcggtgtgctcaatattgccgcgcatggtgccgcctttctgcacctcaagcgtgccggtggtcagcttgttggtacacacgacctcgggggtatcgagggtgatgcgggtcacagctttcaccagcacgactggcacagtgacggtgatggagcccgatgctgtcacatcagccgttttgacgccgctgaccgtcagcgcgccggtctcgggttcatactcaatgaccgcgccgtcagggaaagccacatgccacgcatccgctgaggcagacggggcgggattatcatcggagaaaatccccggcagcacgaaagcggtatcgagctcgccaccgattgccagtagcagcacctgctcaccgaccgagggcgcccaccacgtccgcgaacgaccggcgcgatgggttaaccactggagccagtcggtaaaaattccgcccgtctgcacgcgacagcgcccggtatcaaggtcagtttcgacaatgacaccggtgcgaatcatgttgcgtatagtgcgggctagttcctggatagatgcgagagtattcatagaagaaaggatgccgcctgggagagccggcggcaatttgcgggagttttatgagggactacacaacgtatggctaaatttcgagttcaacagtaactttttgttgataaataataggttcctttaattcttcacaaacaattttgaattcaatgtttccttcccctggagcaatgggaataagaataattttctcaaaggtgatagagcggctttggattaatttctttgacctaagcaatactctattttttttacactcaacccattcacttttattaaacggctgcactctactgatgattccattaatggctggaagatcatattttggagctgagaaagaaccacccaaataattccctccacttaaaatcctgtccctcagaatatccatgctagttttagctctaatttttctttctgccatttcaattgggcttatcggtatatttaactccggcactcccgttgaaaatctctcagtatcatattcgtcaactgcaacaataaaaccagggagcgtaatatcaataaaaatatcagttgcaacctttctcccgtgattctctaacacaggcttaacatacatagagtgattattatagtaatgaagcatagaagcttttctattgtattcatccaccttgttgtttgatggtatttttttgttgtagctttccacgtcctcacttgaaatatactgttccaatttcgatggaatatcagaaatattaaaaggttttatgtgttcttgtggattggggaggtgagaaaattttaatactaaatcttcagggaatgatgataattttaacaatggctgctctgaaagtaacttactttcatattcccgcaaacgttcccttagctttctgttttccgttgataactcagccaactcgttggatacttctttcggtgtggcctgatcccctctaacccatcctatacgtggatttcttcgcataaccttgggtagagcgattgcaactttagttgccaagtcttcaattgattcccaaaagtcacacattttattagctttagccttttcaatgaatacctccaacctttctgctttagcatgttcggtttctctctcatttggtttggttagtacatctctattacgaataaaagctaacacaggtatatttaacgacttcgcatagtcatactccatctctgtatagctaattcctttcgcagatatcgaaccatatttatgaccaataataattatataataatcgcttgcatcaatcgtttccttaataatatcccactgttcggaatcatccgcactaaacatttccatgccaacggggaaatgatagaggctcaatactgtttcaattatttttttacgtgcttctattaaatcaacatacgttgagctgacaaaaacctgatattttttatcgtccataaatccccctgggtaaacatggataaattactctaaaaaatgtcaaaaggtctagccttttatgtgatgaacgatttcatcgaaaatagcagtctcaactgatatcctgtcatacgacgaaaaacctaaaagctggcgctgtgggtattcgactgcagcgcttctttgggttggcctgtcctttaatccgagctgatgcacacgggcgatgcgctgcacttttccggtaaattccaccaccgccgcgctatcgttaccggtcactttcataaagcggttagtgcgcagtttggagaacatttcacgcttaatgcggcctttcttaccccgcaccggctggcgctttcgcgcggcatacggggtgccgtcgggtgcctgctgtcgcttaatccgctgttgctggctggtgcgcagctttttcgcaatatcagccgccattttccgcctcgccgccggtgataggcaggtaatcagaccggaaagatgctcctgcagcgcggttaattcactcatcccacttactcaccagctcaccgttaatgtacagctcaaccgggcgtgtcaccggctcaggtggcgacggctccggggcatagctgacatgcagcgcgccatcgacctctttaacgagggtacgctcggtgagtctcaggctgatactgatatcgagcgaatcgtcgttattgatatcaataatccaggtgaatcccttttcccgcccctcgtcggtggtcatgatgtctggctgatgttcgcgcagccatgcctgcaccgggacgaaaatcaaatcgaggtcgccggtgaagtcggtcaccactacgttaagcacgtacaccttttcaaacgacagcgagctcgccagtcgggaatcggtatgcccgttatcggcgaaaaggcgcagcatatcggggttatttcggagctgcggcacggcgttaatcagcgctttgcgcaggcttttgtgcttctgcatcgagttcatcctgacagtgtttgacggttttgacctgcagcgcgcaggcggtcagcgccccctcaaggcggcgtatatccgcgctcaggtcgccatttgttttcgggtcacttcccggcatcgggcaaaggctcaccctcgggcatccgttgaccacaatcaccggcgctggcgcaggcggcgcgggtgtgcagccgacgcacagcatcaggcagagcagcgttataccagcggcgaaaggcttcattttcattgagtaacctcgtaattgtctgctcacggcgactggcttctgcactggcctctgcgagctgttcgcgcagtgctacctgcgcggattcattacgtctggcgagctgaccggcgacactgagctgatttttcagcatgccaatcgtcgtcttttgctcgctcgcgacgcggtttgccgtctcaaaggcgcgggataaattgccgttctcatggcgcaaccacagcagaccaagcacggccagtacaaggagcgttatcaggattttcataccatcaccccgccagctgtgcgccagacggtcaccagtttttcgagactgtgctcacgctggccataaccggcccccggtaatgacgcccagatattgcggcagcgggaaattgcacgttcaatacgccccgccttaatatcatcaatcgcgccacgctcccggattaactgaatcgcaagtttgtcctgcgacagtgggctgaaatccggtaatgcgagctgtttctgatagtgcggccagtatcgataaagctgttgataacgcccggatgccgtggacttttcgcccagacggttaaacactttcgcgggtcggccatgcgcgaaagggtggtcgctgtagtcgctgaaaatctccggcttgccatcaaggccagtgacaatgacgtcgtaaccacgattttttgtcagcggatgcgtcgccgttccctcagaatacgccagcatgtccagaaacgcggcgatattctgatgagtattaatgaccggcatcactctccccctgttgcgatttaaagcggcgctgaatggcgatttccacgacctgataaccggcgatgccaagcatggatccaattccacagatagcaggcagtgacatatcaggaaattgcaccagaacaacaccagcgaccatcgagacaaaaccaccgagcaacatgcgaccgataaacaggcgcggggtgatgggctcaccaccggccagcacttttccgacaacaatcatcgcgccaatcaaaaacaacgacaggacgcctttttccccttctgtcatggttactcccaaagattgatagtttcagttacgggtgacgatgccacgtcgggcaggtcaatcgccgtgccatgcggcagaatgacgccaagctcagacagacccggattagcctgcagcaccgtctcgacaacgccctcagtgcgcccgtaataccgggcgcaaagcgcgtcgagggtatcgccctgcatcgcataggctttcatcagagctgacccacgatgcagcgtggcttatcctgcaggcgcgcaaccgaccagcgcatatcccgccacaggtcatcaatggtggtttcgacgctgtcggcttttttgtcacccttgccggtagcctcaacgccgcgataacgctcatagagggtggcggttgtcatcgccgttacggcgctcaggtagtggaaaacgcgcacattctcgccgtcgatttcctcggcgtcaggcacgtcggccagccgcttaaaccctgcggcaagctggcgcagccggtagtcgtaaagctccgcattggtttccgccatgccggtcttgatggcgttgcgcaggcgcgcatcggaaaccgtctgctcaaggcgcatcagcccgcgcacccgcttcggatccacatcaggaaaaaagaacgtgtttttaatcactgcgtcgcccgtctcaggggcgggaatcaccacgcccggaatgtcctgcagttcatcgggctgattcagtatcactgtcgtcatgacaacctcgttaggttgggcggtggacgccggtcgccgtcagggtcaatacccgcttagaccggcgtgccgcccggctcggggagcgttcagttaaccggcggttttaaccgcctttggtggacgcccgcgctttgccgccggtttggtggcaggtttgcgcgtgcgcggtttagtcgttttacggggtgccgtttctggttttggctttaatgcgcgttccagttgttcaatcgctttgcgtacaccgccgttgcggtcgagctgcatagcgcgctgaaactgtgccagcgcctccgcgctctgaccggcatcgcgcagggtcaggccggtcactttatgcagacgggcgcgcaccatatcgggaacgtcggcaccgtcggtcaggtcgatggtggtcagcagtaatgcgaggtcgacaggctcaccggcatcgcgcaggcgctgtgcggcaagagccacctcttcaaccagcatgtaaggcgtcgtgcggcgatggtcagaggtgaggccgtatttcagcacataaggggctatttccagcgcgccagcgatatcaccggcatcgagacgccacagcatgacggtcattacaatgtcatcctgtgcaccacggccatcagccagcacaccggcgacccacggcgcatagaacggcaacagctcgcgctttttctcggctttgcgctcatttgaacggatgttttttaacgtgcggcggtcttcggccagctttaccagcatctgctcgtaggcggttgcatggcgcagcggggctttttcccgctgcgcggcttctgaggccgagacccgcatcatgtgacgctgtgcggggctcatcatgggtttactctccgctttccggtgctgcaggagcggtgaattcgcccagagtgatattttccagcaggcacccggctgcatacgcctcgaccacataatcgatgttcatcgactcgtagttttccacgcggtcgcgtttggggttttcgatgactgaacggcgatgactatcatccatgaagtagatagagaggttttccagcgtggtcactaacaccgcattcgccgggaagtagggcacgcgcacggctggcaggttgccgattcgcttctggctgataatgacgtctgccgcaagcgattcgctgttttcctgctgtttattaaccagcgggaaatatttatcggccagtagcttgcgaccaacaatagcaaccagtttggttgagtcctgataaacctcatcaatcagggtacctgtcgcatccattaccagcgcgtcgaggttctcgtagtcgccgtttttgccaacacgaatcacatcggaaacgaccttgccgtcagcatcggtgattttgctcatcacgcgtgccggggcttcattacggtacttctgcagccagccgaccgccacatcctgcagcattgggttgattttgcgattcgaggtcggtgcacgatgagtgccgttaaaaccggccatgatgaaatccagtgcctgacgctggataatggcgtcgcgaatgcggcgctggatgtcctgaaaacgcgcccacaggtcgagcgttttatagcgcaggtggaagtcaaagttgacctgatcgcactcatacttattggactcaagcgcgacaaagtcagatgtttcgcgctcatcgtcgccagaggtgtcggtcgtactggcaatagtgccatctactcccacaccgattttttcacctttcagttcatcaaccggaaaaatgttaatcatcttcagaaacgcggatgacgcctgcacggtgttcatcagtgtttgcgtaacggacggttcgacggtgaattttttgctgacgtcttcaacgctgatgccgttcagtttggcgagctggctcagataggcattgaatttaaaacgggtttcctgacgcatagtatttcctgtttgaattaattggttagtcacagcatcgggcggggtcgccgcccggtttcagacctgcgggttatcagcagtcggtcagcagctcatcgccaccgccgccgctggcttttgcgcgtcgcggctggctgaaactttcggttttatcgagggtggttttcaggacggaaaatgcatggctggtttcttcaaccttgccggtcagttcctgtttgaaggtcgcaaatgcggtttccatatcggaaatacgcttatcctgtgcggtcaggttggtctgcacatgctcgctgacggtggtcaccgcttcatgcacatcattcaggcgcgcatcgtcgctgacctgtttgcggctgaaaatggcgctcaccttatcgaccagactgttaagcaccgtgccggggacgtcttcaaattccagttccgccagcgtggcgacggaaaagacgttttcaggattggccttaaagcgctgcagcgggttgtatttcgcggtgcggcagaattcgagatattcagtgccgagacttgccgggtcatcggtcacagccagaccaacgaggtagcacttgccggtattggcaaaattcggctgaatttccatagaggtgtagaccttctgcgcggctttattcagcgcgacaaggtcatcggtcggagtaattttggcgaataatgcccacttgccgttcagcgcggaatcgtcgtcaatcttctcggctttcagctcaacaacatcgccataacgtttaaatacgccatcaggcagcagaccgcgaatgtgttcgagattgatgcggcaaccatagacgcgcgggtcataggtttcggccatttcctgaatatcattaccgctgagaattcgcccgtcgcaggtgtcaccctcgacgccgatacgaaagaactttgagactttttttgccattgtcaggagtcctgaggttgtggttacgggtcaccgccagtttccagactcagaccaccctcagccacctgtcacgactggacaacctcccacacaacagcaccttagcgaatcactgatggccattaagtagccttgccctgaatccattacggcgaggcatcaatgaccatttccaccgatacaaccttgttgcatgacccgcgacgacaggcatcgctgctttactggcagggcttttccgtgccacagattgccgaaatgctgcaggtcaaacgcccgaccgtgcagagctggaagcagcgcgacggctgggacggtattgcaccgatttcccgcgtcgaaagcagccttgaggccaggctgattcagctcatcgttaagccacaaaagtcaggcggcgacttcaaagagattgacctgctcgggcggcagattgagcgactggcgcgcgttaaccgctacagccagaccggcaacgaggccgaccttaaccccaacgttgccaaccgcaacaaaggcgagcgtaagaaaccgaaaaagaactttttcagcgacgaggctatcgcaaagctggaagaaatattcttcgaccagtctttcgagtatcagctgcagtggtaccgcgcagggctggcgcaccgtattcgcgatattctcaaatcccgccagattggcgcgacgttctatttctcccgcgaggcgctgctgcgcgcgctcaaaaccggccataaccagattttcttgtcggccagtaaaacgcaggcttacgtgttccgcgagtacatcatccagtttgcgcgactggtcgacgtcgacctgaccggcgacccgattgtcatcggcaacaacggcgcaaaactgatttttctcggtaccaattccaacacggcgcagagccataacggcgacctgtatgtcgacgaaattttctggatcccgaactttcagcgtctgcgcaaataggtctcgggcatggcctcgcaaaaacacctgcgctcaacctatttttcgacgccctccacgctggcgcatggcgcttaccccttctggtctggcgaactgttcaacaaggggcgcagcagtatcgccgagcgtatcgatatcgatatcagccacaccgcgcttgccggtggtcagctctgcgacgacggacagtggcggcagattgtcaccattgaggacgcgcttgccggtggctgcaccctgtttgaccttgaccagctcaaacgcgaaaacagtgcagaagactttaaaaacctgtttatgtgcgaatttgtcgacgacaaagcgtcggtgttcccgttcgaggagctgcagcgctgcatggtcgacgtgatggaatcatgggaagactttgccccgttcgccgattatccattcggatcccgcccggtctggattggctacgacccgtcacacactggcgacagcgccgggtgcgtcgtactcgcgccgccggtggtctcgggtggcaagttccgcatgctggagcgccatcagtggaaaggcatggactttgccgcacaggcagaggggatccgcaagctgaccgagaaatataacgttgaatacatcggcattgacgcgaccggcctcggcctcggcgtttatcagttggtgcgctcattcttcccggcagcgcgcggtatccgttacacacctgaaatgaaaaccgcaatggtgctcaaggcaaaagacaccattcgccgcggctgtctggaatacgatgccggggcaaccgacgtcacgcagtcgtttatgtccatccgcaaaaccatgaccagcagcgggcgcagcgccacctatgaggccagccgcaccgaggaagccagtcacgccgatatcgcgtgggcgaccatgcacgctctgttaaacgaaccgctttctgccggtagcggcatgcagccaaaatctattctggagtttaattaaaaatgggtaagcaaaaatcccgtaaagccgctgcgcaaaaggccagcaagtcacagcatctgaccgccagcgcaccgccaaaaacaacagcgttcacctttggtgagccggtgccggtactcgataagcgcgatattctggattacgtcgagtgcatcagtaacggcaaatggtacgagccgccggtcagtttctccgggctggcaaagagcctgcgctctgccgtacatcacagctcaccgatttacgttaagcgcaatgtgctcgcgagtacctatatcccgcacccgttgctgtctcgtcaggatttcagccgctttgctctcgactatctggttttcggcaatgcctttcttgagcaacgccacagcgtcaccggccagttaatcaggttgctggcctcaccggctaaatatacccggcgcggggtcgacgactcgattttctggtttgtggaaaacttcactcagcctcacgaattcgcccctgatacggtttttcacctgctggagcccgacatcaatcaggagatttacggcttgccggaatatctcagcgctcttaattccgcctggctgaatgaatccgcgacactatttcgccgcaagtattaccagaacggcgcgcacgcgggttacatcatgtatgtgaccgacccggcgcagagcgcgaccgacgtcgaatcgctgcgcgaggcgatgcgtaactcgaaggggctcggcaactttaaaaacctgtttttctacgctcccggcgggaaaccggacggcatcaaaatcgtgccactgagcgaagtcgccacaaaggatgatttttttaacatcaagaaagccagcgccgccgacctgattgacgcgcaccgcgtaccgttccagctcatgggcggcaagcccgagaatatcggttcactcggtgacgttgagaaggtggcaaaagtctttgtgcgtaacgagctatcaccactacaggacagattcagggaggtaaacgactggcttggaatggaagtcatcaggtttaaaaattacaccctcgataacccagaataacaatccccaagccgccgcgatggcggctttttcatatcccgccatcatcacgcctcagacgcgccacacgcgcgcaactacattagaccaccaacgagccgacagcgaccacgacagcgccgtcatgacgcgctcagacgataatttttaataatgcgcaccaccgctggcgcgcaatgctttccccgccacgcctgcccgctttatggggcaattttaatgcagttgcatgaccacgccggatccgtgccagctctggcggcatacagccagaacatgcaacacatgatgcatgcaaaaccatgcgcgacttgcatacacgactaaaaaagtagagagattatggtgaatggcataaaaaaaccggcatttagggtgccagttttggtcgattttatagtggttactgactacgcaatgcgccaaaaacactgttgaggcaaatactggcaacaatcagcagaaaaattttcggccacggattttcataaatgagagataacatattgataacctcggcaatatagttaactatttgttttaatttgttaaaaatagggggctgcagtacaaaaatttggtttgctcatcaaagttacttaaactttgccttgctttaagacacacacaagagattcatattaagtagagaacaacataaggatacgaaatgggatacgagattgactttttagccgttggcgaaaaaaaaagtggggatgcaatatgtatcagatggggaaatcttcacggaactcgggacgaacaaaaagtagttgtgatcgatgccgggtatgcaagtacaggccctcagatcatcgagcatttagagaaatattataatacaaatactattgaccttctcatctccacccatcactgatagtgatcatgttggtgggttaactcatgttattgaaaatgcagaagtaaaagagttctggatccacaagccgtgggagcataacgagaacctagcgcaggagtttgctgacgggaggataacagatgagagtatcgccagacgtatgcaagaaaacctgcagaaagcttatgatgcagttaaattagcagaaaaaaagaagattgaaattgaagagccttttcagggaaaaacatgggacaacgcaacattggtggtcgttggacctacacaagcttactatgagactctaatccctgattttgcaagaatgcctgaaaaagcagttgctacatcgggcacggaaagtattaaaagtgcctataattattttgttgagaaagctaaggaattggttaaatatgttgccgattggttctctgacgaaggaattgatgataaagatactacttccgcacaaaataactcaagcgtaattataaagcttgaaattgatgggaagactcttttgtttaccggggatgcagggattactgcattagatatggctgctgaccatgtaactagttcatcgctagcatttattcaggtgcctcaccacgggagtcgaagaaatattgggccagaagtgctaaataaacttgtcggaaatattgttagcgagggggggactcgaaatatttgcgcgtttatttcttgtgcgcccggttcggaaaaacacccacatcaatcagttattaatgcgtttactaggcgtggcgtaaaagtaattacaacagaaggaagcaataaacgccattctaacaatgctccggcaagggaggggtggactactgcagcccctcgctcatatttagctaattataatgtggaagaataatatgaaaagctgccctagggcagcttgttatttgctttgttaattcttttaacaatatatttgacttgcttgatgtaggagataatgaaaacaaaaattagaaatattgataggtatttcgatgcctcgaagctaccccctgttatttttgaaataaagtatgaggctgcaagtaaaagcagagacatagacagcaatgttctatacatgtttgccgtttcttgaagggtctctattttattgtctttttgacatgcagagatatattctgggtaaggggtgaacttcactaatttaattgtttttaataatggttcgacaatgattgaaccaattctaccaatgattaatccggcaaaataatataatacaatgttttttataatatcatcagtagataacattactttagtggagcgctcaagtaaatagacaaatagagccccggggaaaagattgttaaatatattgtatgatgagattttttcccataaaccatccatcttcattccaccctatagcgttaacatgtgtcaattgttatgaagattaaaagaaatagcaagatgtattaaagagaaaagactacagtaacctcatgaaagagaaaaaatctgctcgctggtttccaaatcaatctaacatagagatcatatgtaatacccccttagggctaactaaatcgatgaaaaaataagcgtcatcgctgtgtaaactcgttcataaggtttcaaatactaactatctagaacttatgcatttttcatctaaagatattaactcatacaacctattcagctttatagaaaatctcttcttctgcttcgtgattttcgctgtgagcaagatcagcaataagagtcagggcaagcttaaggtctgacggcttacagtttgcaatcaatgacacctctgcaatgaattgcacacaagcccacttttgctgtatccggctgaaatgttcgccaaccatcaaatctctccgattaatgataactgtatgaatgtacagtatcatatgtaagcaatgaatgtgaagcgattttatatattagactaagatatctccatgatatggatactgtttaatctatcttcttggatgcgcatttagccagtgccgccacacgatcaagtatttcacgcccttttgcgtgatgctttttcaccttaaactcataagttggcgcggctcgtaataattcgccagatgataaagcgtgataccacttaccgttaatagagcttttaccccccattatgagatgcagaccctctcctcggctgatgtttatgtcagtgcaggcatgaatattgtctactactctgtcaatagccgtactctgcttctctgttccatggctgaatttttgccttgttgctggttttttcttcctgagtcggtttactagctcgcgcttttcacgccgactcagcggttttgtcaaatccagtaccggtggctcgctttctctccccgtacagttattgacagaactccgagagggcgcaggagcgcccttaacgtcaacggccaaatcaacggcacgcttcggcacaattttccactgcgttagccgggttaaaatcggggtgccagcaccgacagcagaatcgtacacaccacggatgcagacggtttcctcaccgtactggttaaactcggcgcgcggttcatacagcgtgcgcacctgcaaatcatcgcgacgaacaaacggaccaccctgcgcattaacgtaaccagcccagtcaccggcgtcagcggcatcatgaacggcggcaaactcaacgcttaaaccgtgcgcggtctcggtatcagcgagacgacgtaactcacgatataccgtcaccggtgcgccaccgataaactgaaattgacggatgtgccagcgagccgcccatgcagatacggcaggggcggtctctttgagcagctcaccgctttcgtcatcggtttcaccatcgagagcataaccgtcgatatttttcgaaatgtatttagcaacatagccggtagcgctgcccttttccgggtcaatggcctcggcatgaaagcgcgcttttttggctttatcgcttctcagttcgtggtggtcttcctcccacgcataatcacggatgataaggcgcacgcgctcgacgtcctctggcaacatgaacatcagcatgtgccagtgcggcgttccgtcgtgatgaggctcggcaacacggatgccgaaaatgcgtatttcttcccgatgcagcttggcgcgtatgcgcgcccaaaggccagttagatagctctgcgtgtctgatgggctggcaccattccatttgctgttacggtatcccgctttagtcgtggcgtgatatttagacggtgcagtcagggtgtaaaactccccgacataaccgagttcattgcagatattttcaaacccacggatgcgggtcatcagttcgcagcggcgtatcgcaggattagcgaccgaaccgtcgtatttttcaatcaggctgatgcggttgccgtcttcgtcttcgagatccagtcccttgagaaactcacgcgttcggcgcttctgctcgcgccagtctgttacgcagtttttactcgcgtaggcgtgctttttcttgctgacgttgccgactgcaatttgtatgtgttcgcgccatgccgacgcgacacgacgcaggcgattacgccaccatgactcagtaaacatacggattactgcgggggcgatatcatctttgttgaagtatttatttgccacgcgctcccaatggggaggggtgacattgaattgcagagaaataaaaccagcgtgcatgtaccaggtgtatagcgttttgagctcaccaaaacctgaatcatcaatatttgccagctcagaacgaatgaaattagcaatgtcaccggccagcaagtcaacatctgcgcgcgacatgtcagggaggcggttatatctggcgaccagattaaccatacgtgaagccagatattgcattagtcgagtgtcaaaatgaccaccgaaaacggcggttgatacattgctgttgatacccgcgctctcgtatttttttgcgaccagttcaagacgtggcaatgcctttttgcagaaactgattaaaaaagcattggctcgttgactgccctgattttgctccagcaccgtagcggtgcgataaacgtcaaaacgcacgcactcaggctggagagaaagcatctttctcgcatgcagcaaagccgcgaacatacggtcgcggcgatactgttggtcataggtaagatatgggctggctattgccgaccgtggagcgtttcacggataagcataagcaaccgtagaactatgcatcagcgctagccccttcaatggctgcaatgcatagttgccctacacgctcaatttctgccgccatagcgtcaatggcggtaatatccgacccatgaatatgatggtgcatcaggccggaaataagctggttaatcttcgggtaatagccgatagtgtcgagccattcctcaccagcttttttaccggacttaacgactttcttttcattcagaatgaattgatactggtcgctggtaataacccatttatcaccgatttctatgcggaggttcataactcacctcctgccattgcttcaattatcgataatatgtcggtagtactgattgtagtgatagataacatcacccaattaccacaaccactaattaagttatcaattggtaagatgtgagtgatttttacaaggagtttattaccagtgtattcgccctcccattcacgcaataacaggaaatcaccacatttaaaatcacggtcattgattctgaattcagcttttttatgaccagataaaacatctgcaaaaaacatcggtccaatttttaaactatgaactgtactcatttaaacgcccctgtaatgttttgatttaagttcgttgatttgctgacaggtcacgcaaaaggccacgcccggaatcgcaacgcggcgagcttccgggattggtgcatcacatacctcgcaggtaaaacgagatggcgcagcaatacggctgcgcgcgttgttgataaggcgctcacgttctgcctgttcgcgctgttgtgcgatatccattgcgtcggccattagtgcaactcctgagattcgttttcatagcgggtggcttcgcggcgcaacaactcagccgcttcgatagcgtttaaacctttgttagtgatatgggtagctagtgcctcaaggcggattgaaacggctaaagcgcggtctttgtgttcttcttttttggctgctttaaataaagctgctaatgcatcatcgtcagcactactcggtgttgaaaaataaataactcgactcataaatcctcctgaatttaggcaaaagaatgcccggcgggtatacgccattaattacgggtttgtttaattagctaaaaagcattcatggatggaaatatgccgtggcaaaatcccaccccagcgggaaattttattcattgacgcaataatcagcttgcggcgttccatatcaaaatactcatatggtttaccgacttcatcagagcgaaacgcgcccggattatttcggttagcaagcgttaaaaccacaaacttaaaatcttcatcaagcttattgaaattacgcagcgccttattttctgttgctttcagcttttgatgaaaccgtgcgaaacactcctcgccggtcatagtcttcggttgctctgtaatacaatcagcattgctaaaaagcttgctcgcctgggtatcatgagctgaaattctttcgttcattttgcccccattaatgcatttaaaagccgcttaaccgcagagactttttttgctgttaagccgttcaacaattcggactgagagttgcaagggtgccagcactttccgtccttaccggagatccagccgtggccgtagtgcatgccggcgctttgctttttaagcagggatgcaaatgacggttcagtattcaacataagcacctcacatcagaccgaatgaggcaccgaggccgctcatggtgtctacaacgcttgtcattgccgggttagcctgaagccgtgcctgtaaagccattgccgacagtgacaacatgcgaataccagcattaacactagcaatcatattttgtttgcgtgcaggggtaaggcggtcgcctgaaactgcgccgcttgccagttcaccgagttcactcatggcgcgcatgacataggattgcagtttctcttttgcaagttcgttgactggcacgcacggcaggcaatggatctgagccagaaaaccatcgacaagggtagagtcttcggtcaggtctgtcagtgtccagatttcgcgcggcgttaactggtgcggttgttccgggtttaatttgttgtaaagcgtatgcggcttgatgcctgctttatccgccagctctttcacgttatgagtggctgcgaattttttgcaggcgtcgtcaaagtgtgcatgtgacgaaacgcgaaaatctaacatgctgtaactccctttaacttgcaaaattaagttactggaatacggcatagcgcgaattaatcgcctgagcgagtaatcgcgtacggaaggcaatcatgttgatacggccgaggccaccctctcgagtacggggcaccagtagcagctcgccgcgctttaccatctctttaacggtgttcaggctgcatccgtactgctttgcaaactcctcatatgagaggaagtccgggccattggggattgcaatttgaagattcataggtaattatctccggttagattcatttttagtatgttctcgcacattctcagggtgcaggacggatactactttccatatgaaaacctgtaaaggttaaattgaaaataatttaggtatccaaatggataaagaagagcaatccgtcagagatgtcattgatagaatccttgtttcttatggagttagaacaagacaggcttactctgacctcgcaaaaattccattgcccacgattagtaattgggtcaagcggggtaaggttcctggagactacatagtccaatgtgctctcgatactggcgcagaccttaaatggcttatggaaggtggtgaacttacaaatgtaagatttgagcccggtcattaccctatgcagggaatacgactgatggaggcaatgcaaagctcaggtgggaaagagattttgcagcgcatcatgcaggcttatggctttaccatgcaaaaagagctgggcgaccatctcgatataccatccggcacgatgagcgcttgggttcgccgtgagcacttccccggggatgttgttatcgtttgtgctttagatacgggagcatctttatactggcttgccacaggtaacggtggactttatgaaagtaatgtgaccttacccacagagcaaacggcattagccacaattagaaaataccgccttgaaaacggtgaattaaaaaaaacaggtaactggttggctgacccttcaatgattccagataatcatgatggtctgatgtttgttgagggtatgggtaaatcttggctggttgatatttctgcgaagaatattgctaacggccgctggctcatcagtattgatggtgcaatggatgtgttcaatgtgattcggctacccggaaataaagttcggttgtccaatggttctgctgagtttgaatgcaatttatctgatattacaccgtcaggtacggttatttttacaattgagaaacatatataagggattttatgatgcgctcattatttgctattggattacttgttctctgttcatctgcgttcgcagccgagaaaacgcaggcgttagatggagcatcatttggtaatacatggcctctgacttttgaaaaggctacggtttcctgtgttaatggtgcatatgcttttgtatatgataccgctacagataaccgttatccgcttaacggtatggcttccagcgctgttaagtccggaaaaatggaaggttacgatttagatacagtgtggaaagatgaccctaattattccggtgtaaaaatgtcaatatctccggttttagattcagccctgaatctctgtaaataatttattaaaaaggaattggtgatgaaagaaaacaaacatgttgaaaaatttaagttaagccatctgaattcaggtgagtctgtcattgcgtgggcggaaggatatatcggtaaaatgatgggtagtggaaaaaatacccagcataatggcgcgttaattgtgacggaaaccagagttgctttttatcgtaagggatttattggtgaggtaattgaaactatacctttaaaatctatcacctctattgagcgaaagtcgacgcttggtcatagggttataagggtgcacacatcccatgatgaccttgaatttaaaacattcagcaaagagtcagagcttgccctcgttgaagcaattgaaagcgggcgagggttgagaagtgaaacagtagcctccgaaaaaaataaggccagtagcgaccctttcgaacaactcaaaaaattatcagagcttaaagaggctggggtgatttctgatgaggagtttcaggctaaaaaaagcaagttgatggatctgatttaagtgtccttcgatatggggatgatacctcggtttataagacagtctattagccacagtgctagatgtagcaaatagggggggatttgactgttaaaaagctttcatccggtgagtggctatgtgattttcgcgttaatgggagagaaagccgtcgcgtgcgtaaacgcttcaccaccaaaggtgaggcagtggcttatgagcaatattaccgcgatgaggccaaagataagccgtggatgtcagagaaagaagaccggcgcaaactcagcgaaattattcagctctggcataatctgcatgggcaggcgctggttgccagcaaatcccgtctggctaaactgcaaattgtctgcaacggactaggcgacccgatagcatcacaacttacagctaaggactgggcgcattatcgtgaccagcgtctaagtggcaagattgacaatggttatcataaagacccggccaagtgggtagcaaagccgataacggtcaatcgggagcagcaatatttggaggccgtatttaacgagttaaagcggttaggggagtggagtttaccaaaccctctggatagcattcgtgtcttcaaagaggctgaaaaagagatgtcctggctgacgttagagcaaattccgcagctcatgctggcatgtcagaagtacggacatgaagaccttgcacagattgccgaaatttgtctggcaactggtgcgcgctggggggaggcagagcggctaactcgcccccaactttcgccatacaaactgacgtttacaaagaccaaaggcaaaaagaatcgcactgttcccatcccaaaatggctctacgaaaaattagctacccgtcaagggaggatgtttaagccctgctatcaggaattcaagaaaatgcttttgctcacagatattgagctgacggaagggcaaaagacccacgtcctgcgtcatacttttggtgcgcattttatgatgaatggcggcaacattctcgtacttcaaaagatactcgggcacgcaaacattcgtgaaacaatgaaatacgcacacttcgctcctgaccatcttgagcaggctgtcgagctgaatcctctgagcttgataatgtccaccgaatgaccacgcagcatgtgcgagggtggtttaaaacatatctaggatgtgcgtaacttattgttatttttgtatgttgttgatttttaatatcgattactagaagcgtcttaactaagattcgctttcgcgacatcctgatagaaagggctggccagatggctggcccttttttttatctaaattttaactattttgatgtaaatcaattacaatatcgcccggatttcggaggggcggtgaacggcactattttttcacaatcagcattgcaacggcgggccgcctggctggcgctgtttgcgatcctgctgatcgtggtggcgccgctgatctccgtttcgctacagaaagatcccatgagcgcaatgccgggcatgcatcatgctatgccgatgggcgagtctcatgatgggatgtccggacatgagatggtaatgatgcacggcgctgacagcgcgtcgcagccggcgcatagcatgccggtcgatcacgccgaagcctgcggctattgcgtgctattagcgcacgtaccggggctgctgttcgcgctggcgctgtatgactgcggatcgtgcctggcgtatcgggatgcgccggttaatgaaatatctccatcaacgccggacgtatacggctacaacagcaatgctgggatggtgccatgattttggtgaccacatcattttgtcagatgatattcgaaccgggaaaacccaaagttgcctgattgacgcaatgacatacgactttcaggaaataacgctacatgtcaccgagcctctggactggagctatacaaatccccggtgctggatacagtttcagaacagtcgtccatcgtcacggatgctgacgccgcagcggatagatgatttcactcttaccataccttacaacgacgatctgcacccggaagactggattatggacgaccctgatattgatctaccgcgtttgctgttctgcgacagtgaaaaaggtgcccggcatgggatagtccaggaggtagccccctccggtgacaacaactgtcagattaccgcgccggaatataaagaaattttctacgcctacgacgacgccacataccccggcgacgtctcgtaataccccataaaaaccccttattaactcttttcgctcaaaccctcgtttgcgcgaacgccttttttggagcaaaaaacatggcctttaatccgccgttagggagcacgtctcccgaggtgttggtcggtaatgccaaacgtctcgatgaactggtgaacggccccgccgccgacattcccgatcgtggtggggatcctctggactcctggcgtttgataatggaacaaaaccagacacgcgtagagcaactggacgacatcattacctctcttgatactgcgagcttcactttcccggacgaacccgcaggcatcgctggcacgactgatggtcagtatttccgcgttcctcagggggaaggtaacgttgtcggatttaattattataaaaacagcgcaggtatggcagtcattgttgcatcagttgcatctgcagaaattactaaattgctgggcatgaccgatgattctggtctcgtacggacagtttcatctgatggaaagattacggaagtaaaaacagagaccggtgataattatctggcggggatggacgaaagcattcaggagatggcgtcgcgaagtggaaaagacagttcagttaatctccactcagctacggataaagacgggctacagctagttattaccgatgcggaaggtaagatccgcatccctcttactgattttacgctgcaggatctgctggcgcaggttcatcctgtcccggggccgtttctcaacacgctgagctccgctgataaggcggcatatggctatattgatgagctgggcggtcttaatctcccgggtcttccgacatccgttaacaatatgctgaacagcctgtcccgccgcgtgcagcagcaggcagatggccggtttctcacaagtatcaaggactatggctgggaccctaacagccaggaagatgcacgacaggtgattcagcgcgcaatccgggacatggcccgcaatccgtatggtggtgtgatttacttgccgccaggagtataccggctgagttctttcctcacgcccgcgccgaacgtatcgattattggcgccggtaccggcaaaacaatcctgatgccgtatggctcatattcggcgctccagttcaccacatcaccgacgaaccccatcccggaactgacggattttgtgtattccgattttgaggtggattgtcaggaccaggtgttgccggatgagggttatctccccaggactaaggggctgtattttaacttctaccgccgcggtcacctgcaccgcctgcgcgtgcgaaactctggcgctacggggattggcatcgactttgcgcgcgattccgcgattactgaatgcgtggtggagaactttggtcggctagcgccgtcgggtaacgataaccctgcgggggcatctggtctcggattaggggctggcggtacgcagagcgagccgctgtatgtcgcaggaaacttctgccgcaacgggaagaacttcggcatcttccttgagaaacagcacggaacaaatgcgccttacagctctgaacacacgatagtcaccggcaacacatgtacagggaataacgctggcctgggtgattgtggtgttgatggcatgatcgctaccaataacaacttctcagaaaataattatggcgtgattatcagtccgggaactgtgctggcatatcccggttcgcgcgggcgtctgcagtgcaatattatcgccaaaaatgctaaacatggcgtctattacaacagcacgactgagcagcgagacggcgaataccagattgacagcaataccatccgtgataatggcgaagatggaattaacctcaaagcgccaggccaggaagtccgcagcatgtttatccaggggaatgacgtttatcgaaacggacggcatggtctgaacctggaagacgggacggcgatcaatatggatgtggtaaacaaccgcttctggaataacggcctgaccgcttccgggaacggaattaatctggcctcagaagttaagatcagctcgttcagcgcaaataaaattcgcgacatccagtctacgcctactcagcaatatcctgtttatgccagcggtacgcttaccgatgtcgatatttcatttaaccactgcgtgggtaacgcgcagaacacactaaatctgaccggtacgcaaacccgcgtcaccactctgaacaatccaggaatctgacaatggcaactcaaatcaagagcaataaaacttatcagggcgatgctgccgcacttccttccccacaggccccgatgccgaaactggccagtctttacctggactttgagaaagagctttatattgccctcggcagaacaacgggtaatgcaattcgctcccgccgtctggctgacgtggtaacctttactcgcgcatcagaaaccacgcgggtaaacaaaagcggccttatagagtatctggcgtccggtgaagctgcgatcgaatatgatccgattactggtgagtgcctggggcttcgcgttgctgcaggggtaactaaccttgcggccaacagtgaaaacttttctggcacgacctggacaaaatcgggcgtgtccaccacggccgccaaaacaatcgcacctgatggtaacgtctctgcatcacccttcaatgaaagcactgacagcgctgatactgtgcactttatgcaggaaaattccactccggccgccaccgtgggaagtcctgtcacattcagtatttttgcgaaagcgaataccgcgagtgttatccagctggtcgctcagggtgcagtaacaacgacgcagtttgctaacttcgatctggtcaacggcttaagaacccgtagctcgtccggcatcctgcagacaagtatgcggaaatataaaaatggctggtaccgtctgagtatcaccattacccctgcgggcaaagcctccccgcagttcacgctggcgcttgtgaatgatgtgacatcagccgctgcgttgccagcctatacaggttcagggaagggtgtttacatctggggggcgcagattgaaaactgggatggagtgacgccatacattccgacagctggcgcaactgtgacccgacctgatgaggtctgcaccgttcgtaccgatcttgattttctggctgctgaccgcggggcaatttttgctgattacaatatgcccgccagcctgcaggcgatgagtggtgtctataacgccgggcaggcaattgtctgtcttgataatgacagtgtcgctgaatatgtcagttttctgaaccgcagaatcagtaacagtatcaccaaccagaatctggcggccgccgcgaaaattgtcggcagttctgaagttacggttgaggtaaaacgtctcggccaggtacgaaacggccatcagtcctttatcagttcatttatcaacggcgatatgcgtgtatttgacggcattaacagatacagcggaacgccactggtatcaacacaactgaaccgactgatgatcgggcgagcaagaacgacaccgtcagcggtttccaatacatatctcaaacgcctggtgtattacccggtcacgttagtggaagctgaattagtatctcagtttaattcactctcctagttatagattgtggctgtcgccgtcactgacagccacaatatctgtaagcccgtgaattagcttactgataagaaataatctcctccatttcttcatcacccagcgcagcaggccagtagatgattttccttatatgcccgttaaagtaattcgttgcccccatataagagcggccaatgcacaggcgagaaagcgccggagggaatgcggtaacggacctggaataccagttatagccatcaaacagtttggttgtcagcgcggcgccgtcaaaggcaaatatgcatgactgctcactgtcccttaccgatgccatgctgggaatttcaaggttctgtgcgatccctgttgagtcaggcgctacgccaagagcagccccctcagcggcacctttagacggcgggcgatacgaaaaccggatgttgggtccttcagccacattatcgagtacgacaacacacgataatgaaccatacgagccactgataagctgcaggctgtgcggatgaacaacgctggccagaactgttcctgcggctgcagaaataaactgcgttgtggatggcgttgtgcacatgtcgctgttgcgggtaacttctgcacctgccgtgggaatatacgacgtcgcaccatctttacgctctggctgagccccccaaatccagaccgatcttggtatgacggcagtgtaagacggaactgcctgtgcgctactgtcattgttcaccagcgcaaccgtaaactgaggagaggttgcagatgatggggttatcgtaatggcgcagcgataccatccgttactgtattcctccattgttgtctgcaacattccaagggttgatgaccccgctgaaatcttaccaatctttccattacgcaggttgaagttggcgaaggccacaggcgaaaccgcaccttgcgccgcaagttgaataacatctgccgtattggctttggcaaagatgctgaacgtatacggggcaactgtggcgtcgctggtcgtcagtgccaggagcgttctgggtgatacggaggagccagccgtttcgataattttggttgctgtggtgttaccatcaggggagacagcatcattggctgtcagcgtaatcccggttggcgtccagcttgccatttttgtgaaatcctgagaccaggcaatacggttaatggatgacagctctacgcgtaacccgaggcattcatgcgtcacagggtgataatcaatcgctggctcatctgtagcaagatattcaatcagcccggttttgcctactcttgtggcaatgccggcacgagtgaatgacagaatatctgtcagtgatgccgaacgaataacgttaccgctggcatgtttaatgacatagcgaccggtggagaaatccgcgaataagttagccccatccgggagaggagcgtttactgacggtaatttcacattacctttaagcttcatattactttgtacgatagtcgccattatgcaatccctgggttgttgatcgtggtaacgcgggtttgtgtgccggtaagatttaaggtgttctgggcatttccaacacaatggttgaatgagatatcggtatctgtcagtgctccggagagattaaccgggtatcgctgggttgcagtgtcctgcgtgtcgcggattttattgccggtaatcccgcatttcaccatatccgctgcgccagcgatggcatcacccgcttctgtgcggccattgttccagagccggttatccataatgtcaacattaaccagattgccactgacaaaattaagcccatgacgaccattgcgataaatatcattatccgcaaacttactgttcagtaacttcgcggacgtatgagcatattcaacatgaatgccgtcaagctcgttatcagcgatacggttaccggagtaattgtattccccctctatagcaatccctttgtccgtataaagataaatgccgtgtttagtattgccgttgatgtggttgtccttcagaatgccacggttaccagggttccccgcgccgtttgttcccggagagcctttaaacccatattcattgaaacgcaggttattgccgatcgcgatgagaccatctatgccgcagtcagccattcccgcatggttgtactcacacacattcccgaccgcaatcgtgtcgcgggccacacccacgccgcgctggggctcataaaatatgccgtagtttttattgtgtttattcaccgtcagataaacaaagatgggctcactgttaaggaacccggtccccagcccgataccggaggcccctagatcaccaacaacgccgagacgtccacagttttcagtggccacccgcataatagacacattatccggcatatcggtacctaaccctgtcgcccccgtattctgaattttgatacggtcaaaaacagtattcctgtaatactgaaggaggatccccttaatattgggaatataacctcttgtcgggtggagttgctgattttcgccatcgatggtgaagtcggtaaactgaaggttttcgatataaatttcttctcctgtgtactcaaacgccgaaaggtagccatagggtagaaagtttgtcgcaccaataccggccccgtgcaatgcaacgcctgaacgcggcaccacaggaattgccatcttgaaatagccagccggtacatacaggtgcccgccaccattcccggataaccagttatatccgcgctgaattgctctctgagagtcttccccggttttcgtattcagcccgcagtctctggcgtcaagaaccatcccgcgctttcgaagccgatcgacgtcctttttcattcccagtaataatcgctgaatcccggagggcatttccggagcataaatatcgccatactcatcaacagaggcgtaggcagcattctcagcatcagtcaggcgaaggattgccggggccttatttgcctgaagtgtttttagccggtcccggacagaacctggcatccccgccaggtgcatatctccgaaatcatcctgcactgtgacagtggcatcatcgacatcgttaaaaaaggtcagattgttatccgatgagacattgataagctttttcagcgcatcaacatactcctttgagatcatcctccttccggtttcctgtagagtcccggcaacgttcatgacctcaatagccagggcgctatcatcaggactgcgcacataagtagtgctgccctccgggatgttcgcgatatcagcctgtgctgcagccagcgtcatgtactgcttactcagcggaatgatgttttgccgaacttcatcatttttcgccatcattccgcgccaggtatccagatcaacgccagcgcggtccggttcggtcggcgcatcaccattcaccagcttatccaggcgctcggcgttatcgagcagcactgcgggagacgtgctccccagctccgggttaaaggccatgttatttgctccaaaaaaggctttcgcgcaaacgagggtttgagcgaaaagagttaataaggggtttttatggggtattacgagacgtcgccggggtatgtggcgtcgtcgtaggcgtagaaaatttctttatattccggcgcggtaatctgacagttgttgtcaccggagggggctacctcctggactatcccatgccgggcacctttttcactgtcgcagaacagcaaacgcggtagatcaatatcagggtcgtccataatccagtcttccgggtgcagatcgtcgttgtaaggtatggtaagagtgaaatcatctatccgctgcggcgtcagcatccgtgacgatggacgactgttctgaaactgtatccagcaccggggatttgtatagctccagtccagaggctcggtgacatgtagcgttatttcctgaaagtcgtatgtcattgcgtcaatcaggcaactttgggttttcccggttcgaatatcatctgacaaaatgatgtggtcaccaaaatcatggcaccatcccagcattgctgttgtagccgtatacgtccggcgttgatggagatatttcattaaccggcgcatcccgatacgccaggcacgatccgcagtcatgacgacatcgatggtgtaagcctccgttttccgggggaacggattttcaggcgtccggcactgtacggtctcctccgcccaggtaacgggattgatgtatttcacatccacgccatcaaaatcgtcctccgaaggcaccctgaatgatgtctgcatttcctcgacagtatcctggggggtgatgattccggtccagcttttgaccccttcacgcccgacggaaagtaagccgtcagacagcagaaaataccccatgcctgcttcagctatcttgtcgaaaatatcctttgcggacgtgctgtcactgcttgcctgatggtcaaaatattcgcctcgtggcgtccagtagttagcctcaagcatgttaattgtggaaatgtcgatctggtcgtcgcgataacccagactgcgggccagatgcaggaatgccccgctgattgtcctgtcaccaccgccatcatagtttcgcgtcgcgacaacactcacacgcttgtctgactgcgccgccagctggccgccggtttcaaccgtgatccctattgttgatatccctgcgtaggaggtcggacgggaaagcaaacgacctctgagcgcctgccagaacatgctgtccctcgcgttgttactcccctgctcgttacggcggcggcatcgaacctccaccagcccgggagaagacagattaaaacgctctgtaaaaccgaggccattaacgtttttaagcgcgtacaccccctgcttactcgtccaccctgatccggaaccatatacgcggtactgaatttcatactcaacatggcgaacccgcttattcccgttgttctggaatccgcaaattccgtttgggaaagcaaagttgacctcgaaggcgtccacaacttcattttgcggggaggccagaaaggggccgagccatgtttcattatcgttgataccagacgcggcaaaatccacgacggtacgggtcagaaaacctgaccaggtgttgtcaacggcaccgttaaccactctctgtacggtcgcagacgctccgtcagtcgatgctatctggtattcgttgccacggtgagccagggaaatccgctgcgtgccgtccggcaggccagaaaatgcggtaccggaatcgtatgccagcctgacactggctgagaccgccgggcttccgccactggatgctgtaccggcagtaaacacagggctgtcgccaaaaactgacgcgggcaggaatgatgacgtaatggaaccgccacgccacgggctggagatttccacgatacgaatcacgccgccgtcatcctgagcaatcaatcctgatccggtcagcccgccgttaatcgccgccagcaaaccggacattgtgccgtagtcagcaaccagggacagggtataggtgacgccctgccaggtcagagcaaacgtctggctggttgtcgtaaaatcatacgtggatggcgacgcactggcgcgcaatgctgcagtcgatccacccgttcccggaacggcgtcctggtggggggtatacgtggcaatctgcagatcgtaatcggtaccgctaaatgtcagcgttacaggcataccattatatggcgccacttctgccacggcgtcacctgtcagaacgttaaaaccatcctcaatcgatacctgataattcaccggcgctttcagagtgacaattgccccctcaatccagccaggaggcagtttgttctcatcttcatcatcatcgttgtcatcatcgacatcgagacctgaaaacgaaacagatgcaccgctaacagtcatggcatcagcaacgatatcactggcttcaggggcagtctgagccatatccagacctgacccgcttgatgtcccgccaacttctgtactgttgaaccagacctcgctgcgacggtcccccgccacgttatcgccagggccatagctggtatatgaaaagccatcgcctaatggcagagcaggagtttcacctacccgaaaatcaccgccggtgtaagagaaacgtccatacccgaggcagacaaacatttcgaccgtcatccgggtgggatcattggggtcaaagcgagtgaccggctgcaccaggtaatctggataaattctgtttcttccgaatacctctcggacaggatcgccaagcttggctgtattcgcttttgccgggttcaggtccagtgatgctgaatttcctgatgaaaacccgcccagctctggtttcggggcgaaaaaaagcgcataggccgtagaggcaatagatacggcaaccgatacccacacggcgatttccaggccggttccatacgggatcgggtaaatccgcacatcgctgtctggccgcagcaaacatagtggccattccgcaggtggaacagcccggccgtccagttcgaccgcaacaggatgctttctgtcctgcgagtagctcgggacattcctggccatccactcatgcagggtcatcgcgccatgttcgtgcgtctccaggggttcacccggcaaccgggacggaaaaaactttatcgtcattgccagaactccacgcggttaaaccttcgtatgaatcgcgccagtggcagaaacgtaacccccgagcctggattacattccgcaacctgcagctggttatcgagcatgacaacgatcccgacatgcgtaaccgttgagccggaatagcaggccacgccagcaccttcgcagggctcgcagcgttgcaaggaaagcatcaactttctcgcctcccgattgagaccgccgtcgtctttggttacaccagcgaagtcaggccagaggggtaactccagatcacgccggatttcattcacaatgccaaaacagtcgagtttcgggtatacgcgtccgcctttcagccagatgactgaacggtatttatcagcgtcaaacatgtttgcctcagattagtaacgtaagccaggatgctctgcgaggttgtaacgtttacggggccaggctgttttgagaatattcatatagcctgccgtgacctgtactgctgtcggggtccaggagccggatttaatatcgagcgtatacggtgatgatgccggggcagacatatcggatgaaatgtaccgccggaatgtcagcgtggctgatttcatttcatccaggattttatcgatcgcctcagaaacccttccgtcaatattgctgatagcaaactttaaatcctgtgtcccgtcggcgttcctggctggtaaggcgatatctatcgcgctggcttcaaacgtcgccggctgaccattttccagcatcacggaaacgtcatcccagccactggttagccagtagttatcatcgcctgccgaaatctgcagcgtgtcgtgaataacctccgatccgctgctggcatataatcgctcaagaattgtcatgcttcggccactctctgtttagcgcaatatccagtaacgactggcccgccagccattccggataatttccccagcctgaaggcggtaacggacgctcccataattccagcgttgcgctgtactgccagtattttggcgcaaccagcgtcggcccttcgtaaatatccacgaacctggctttatagggctttaccccgatgggggtctggagtttcagatagaaccatgactggccatctttaagcgcatccctgaaaaaagcctcaaatacctgcgccagcgcatcagttttaaaaatccatttaactgatgcctgggtcggtgttgaggtgtatcgccttcgctgctgagcgcgaccggacgtcatttccgttcgcagtatcggtgatatgggcttaaaaccgtacccgtccatcagcggcataggcaggtactcatccggatagataatatccgccattaactttccctccgggctggtttatcgtggtttttttggctgtagattggagtaaatagcccggccgaatttcttctgtgggttatttacctcggcggttaaggtgttaactatccgctgttcaagagcatcatttcttcgctctacagcctgcatcgttatgtcatcgggtttgccggtgaacgtgcttcgtgcgtccacgctgacagcaatccgtggctgtgcctgaatctggcttgctgcgctctgtaccgcaggggactcacgacctacagcacgaacccccagcgaaccatcagcactacgggttagcggcatgatggcttctggcccagcttcaccgaatacaccagccccttttgcaaacgcaaaatactgcggagtgctgtatacaccgccgctgtatgcggaaagtgaaggcgaatcgtagacaccacccagagcattaaacgaaaaattagcgccagcgctctgaatggccgtcccggtgctgccacctcccccacctccgccaagaagactcccgaacattccaccagccccaccgccgaacgacgccataatcgctttggtgattaatgcctgtgttgccatctggatcagcgtcttaatcaccgtttcccccagagagctgaagatattcgacatcccctctttgaacgaagtcgccccagtcaggacgctggtcatgttgttggagatagagttagtggtggcatccagaatttcgctggttgcggtggcagccattgaactgaggtcagcagcctgatcggcgtagttcatcagtgaatcgctgatccccgcccgccagtctgactgctgttcatcggttttcttgtagtagtcctcctgaatctggagccgttcagtaagcgccgcctgtagcgcttccgtttgctgtttgtacaggtcctcagaaatctgacctttgctgaaatcccgctgcaggtcccgctgctgcttgagaaaatcagtacgaatatccgccatttccttcatgcggtcgcgggccttatcccccatcccggcaccaagaaaatcaatatccccccgatcacgcgcagcagcgttgctgtcagcgagcccctcacggaacgtttttaactgttcagcaatgtttttctgatcgataagcgcagcattatgcagaagagtttcttttttagcttgatcgagtgaggctagctccccctgaactatctgatattttatttttgccagttcattgctttgtccggcgagtgcaatctgttcttcttgttgtttaacaatgcgggtatatgcatcttcatttttttctacctctgactttccgcgaggttttttttgcgattcgttaagtttaaagtctgtagcagcattaccttgaatagctgcgatctgctcatcctgccccggtaaaatattacctttattatcagttctaaccgctccctgtttgatggcatcctgaagcgctttaagcttggcccgctcaacaccttctttttgagagagggctatgctctccttctgttgctttataaaattatcgtaagccgtgttggtttgagctgctgggggctggccgctcccagagcgtttttttaattcgtccatgaattgaatggtaactgatagcgaagttgccattgcttcattaacattcagcgcaccaattatcgagttttttattttgtcaaaagcaactgccgacgcctgaacttttgaggctaattctgtttgtaaattattttgtgcatctacagcattgtttaattgagatgtagtatcagcaatatctcgggatattttgttatattcccgctgatatttagcagcgttctgtacgtaaccattattttgatcattcagaacgcccatttgtcgagcgagagacgtatatttctgaacttcagcagctgcctcggcttgagcatccctcaagtcctccagcttatctttgagcgcgtcaatggattcaccagaatcggcaatagaacctctgatttgaatttcgctcatggctttcgctttttccaccacctcatcaagggtggaggcatactgtatcgcagactgacgcgcctgttcctgattctgataccatgtataccaggcgcctgcccccagcatcaaaatccctggaatgccaccaaataaggatgatacgccagcccatgccgttcttgtaacagaggttagcgcattcagcctctggtttgccattgatagctcattaacggtcgcggtctcggctttgttagcctttaccatatccattgagtttttggccagaagtgttctgatagtcgcacgttgtttttcagtctgcgccaattctaattgagccacgagcgatcgttgatttgaaaggagaagtgatttttctgattcgatctgtgtaagtgaagcatttgccccctcaattttggccgctgtactcgaaatttctgcacctctggcccgtataagctcttcggtgtgcgactttaattgcaacgtccagttaccaagaaaacgggtaactccaatcgccgttaatgcccctgctgccattgctactgtatcaatgttctctgccagggagtcaagcccaccagcaagcgctgcagaggcaccataagcatcgtttgtaccgccaacccaagcaagaaaagcattttcaaccttttgagttgagcctgaaaccgtttttggcattgattcaaattcagcctgcatcactcgcaactgagcggtaatggccggaaccactttatctattgtcaacagtccgttatcagccatcgccttgaggtctttgcgggcaacgcccatacctgccgctaaagcacggatgattcgatcaccgttttcgttaacagagttgaactcctctccacgcaacactccctgagctaacgcctggctgaactgcgtgataacagaactagcctctgacgtgctggccccagataatttaaggcccgtgctgatagcctcggttactttcagtacatcgccagaggaataaccaaactcacgcattgatgctgccgatcgagcaaataaacctgcgttatcactgaacgctgtccctgttttctggctgatatccataagtaatcgttgggaattggagaaatcatcggttgatgttgacgcctgttttaaacgtgcattcacagaactccactcatcagcaagggcgattaggtgcccagtcgcaaaaactccggcaaacgcaccagccatacccatagctgcgtttttagtttctgacaattgtgcagatacttcggctagtgcctgtcttgtctcgcgtgcagaaacagccgcctgccgcccccccctttgcattgtcttataataatcggcccccatgcgagaggcgcgagcgatctcggtctgaaaggactgagaattagctgaaacttttataattaattcgcgaagggttgccattgctattcctctaacaacaaaaagccccgcttgtgcgaggctcttaatttaattcattagtttaatcaatcactcatcctgaccgcatatcttataataaaaatccaaatcagaaccaatgagggctttgtatatcttcttatcatcaatagtatagcttacacctttagagaaaaaacctttcgatttcattgttaaagccaactgaaactttgaataaccagcataagcaccgtaactattttttgaatttatttcaccacaaacaaatccgccaaccagcccatctttttcacctgcttttacaaaccttagatagcgaaactttgcactatctggatctttcatgtcagcagcaacttcctttttagcaatatctattgctttttcttcgccgggcttacatccggccagcactaaaatggataatgccaaaactattaattttttcacacagcgcccctgttggtaaagatatgggtaaatcctaccattggttaagaaagacttcagctatcgttgtttaattcaagctgaagccgcgagcaaagcggcttctaagcctgtaaaaggatcgctgtagttagtcgccgtgtatcgatgaaagcccacgccgtgcgctattcaaaaaccacggatttgtgtttttcacgcctcaaaaccaggcaggtacatttgaacctcatcgaccacacgggcgcgagctgccaaaagcaggcgtttgcgaccaccagatccccattttcccatacggcttgcgcactgactcacttccttggtttcggtgtttatcacatggtcaattttatttaagcgagccatagcatcaaagccattacggatcagcatctggaatgtctcgtataccttaatctcgaataatgggttaagccacgcagcataacggatggcaattagttcgagtccccatgacccctgaagcggaccacctttgatggttaataccgatgcgattttcttcgcatcgctcagggcctgtacaaaccgtcttacttgctttgttttgaggaattcaccaggccgctgtgattcggtggctttgccttccgccacagccgctgcatgaagatcgttgagattgtagcgaccttcaccgtcaacacgaacggaaacgccgtttactgatacggttggatatttcatcgtatttacctttctgtggtgcgagcctgttcgcgtagacatgggcagccaagagcggaacgatgaaatccaccgccctgtctcagactcacactacggaaagctcttgctggaagatgcgcacgcgaatgcgctttaaattgcagataaaaaaaagccccgcgttgaagcgaggctggagacgattcaattttattccgatgctgcgagcaaagcggcctctaatccggcaaatggatcgccactatcgattacctcatcctcttctgtgctccacttgagttgagcatcttcgatggtgactttaccgccctgcgccccgtacatcgctgaaaccagctgggcattgagaatatcgccacggatatcaccgatcgggctgatacggtcgaattcagcccacattctgaattcgccaaccgtcatggtttgtcgcagttcgcccagcgtgcggcccatccggagcgccagcgccatcaggaactgcatgccaggcatttttactttgctttggcatcatccgcatcacgaatgagatcaagcgcctgtttcagcaaccgggaatggacagggccataaattgcttcaacctgttcggtatcatcgacggtgaaaacgtactgtaggttggtatccagcagaatatcaatgaagagtgtgacatctgcccgcatcgcccgcatcgtgcggaaagcacgttctgaaggggtcagttctggcacctctggcgcttcctgcccttccggtagttttggttgttccgggctggcaatcccctgccagcgaatccaggcctcagccgatggttcacgaatgataactttggcgttttcccattccggaacggtgacttcttttttacgaaaacccgccatcggggccagcgccagcgctttaagattctgttttgacattaagtttatcgccggtttcccggcgctccattaactgatggtgacggtgcagtcagatgaggtgataacgttcgccggagtggcagagtcagtgactacacaggagtaaacaccggcatcaccagaaactgcactggccttattaaacgttgcgctggtctgcccgctgacggttgacgaaccttttttccagacgtaggtataaggtgcagtgccaccctggatgaccacacccattgtcagggcgcttcctgccgctactgatagcgaaggtgaaagatcgttgatgaatgacagaatacctgtcgaatcaatattgctgggcttacctttcagacgcagagagaacgttgcagcaacaacaccgttggtctgtgaatcccaggtatgctgacgaacttcggcgcggaacaggaagccattcccggaagggaacacaaccttaaagccgtatacgccgtcattatcgtaagcagtacgcagcgtatcctgcgccgggttgcggtagaagttaccggagagagacatctcagacggtgccgggagtccgttgatattctccgtttcttcggagcatagcgttgtcacgtcaatatcgtttttctgaccagcggtaaagctggcctgtttaatggtacaactcaggttgagccaggtcgccgatgccagctcttccgcagtgaccggcactgatgtaatcattactaccgttttttgggcgcgttcgtacaatgctgacattgcagcctccataaatgaaaaaaccgccagcggcggtcagattggattggttcctgtcaggcaatgaccgttatttcaagcgttgcccgatgcaagtgggttgtagtgtcgtagccggggattttggttacttcggtaggtgaaagcacttccagccgggaaagggcctcaagccgcaacgccctggcctcatcgttagtttctgcccacacgtctacctgaatgtgcagcgtcgattcggcctgcccacagaacacatccccggcaacatcagtcggtatcgagaaaatgatgtaaggagcggccactgcgggtaaatcgtcgctgccaagcggcaccacatacggataaacccgcccgtctgccagcggcgacagcagggtatagatatcatcctctgtcatttcgccagcacctcatcgatcgccttgttcattctctccatcgctacctttgcggcctcttcctgtcgggtatcaaaagcggggcgaacaaaaggatgtgccggggccgtagatgttcccagctccacgaagcgccagtagaaagcattccgcttgttgctggccttcatggtgttgtcgctgttccccgttcgcgggttaacgccacgaatatgcacccccgatgcgatttccccacggcgacggcttttctgggtgacgacaacaacgtttttcttcagttttccgctttgctcaggagcccgatcaatcacttcctgccggaggacttcagccccggcccgagtagagtcccggaggactttgttgttttcggctttgctgaggatttgcaggtctcgggcgatatcctctaagccggaaaaatccagattcacatcaatcatttttcggtcccctgtttgcagagaatttccagccgggtacctttgctatctggcaccggaggcccggtgacattcaatgtcactcctttgtaggggccgttcaggacaagaagccgcgatgatgccgaaatatctttgcgatatcgaacccagacacgaactgtagcatctgccctttctgctcctgctgtcaggttctctcgtccactgattccctttacctctgcccagatagtggcgccgtcagaccactcttctgttggctgaccactcggtgttcgcgtagcaataaaatttcggatggtgatccgatgccgcattggtccaattttcatcatcccctccggctaaacacccatttgaattcgccagggattcagcaaccagcgtgcgggtcctgggatatcaggactcagagcatccccgcggttttcatacaaccagcccactataagaagaaccgcgctctgaatggagggcgtgatgataagcggacgatcgccggcactttcattctcaacagcactatccagagcagcctggtcagcaaaaaagcgacggttaagaaactgcatagcagcatcctccgcagcggcaagatacccctccaccatcgttttatcgatttcatcatccagcctgagatgttccatggctgtttcagtgttgattaccgtcataaccattaccctttggtttcgggggcgcggttcattttgttatcagggacttcaccaactatcgtcaccagcccgttacctttgagctcggcagcacgtaagcgagagacatgaaaaggatcatcggcgggcgtcctgaaaatatcgccatccataaaacgccggacaggctgaacctgaatagtcccggcctcagtgggttctggcgccgcatttttaccgtcggatacagacggttcatccacattttttctggccatcacaatctcctcagaaagagagggccgctaagcggccctgaattgtcagccgccagaagcggttacattaccggtgacaaatgcttccggacgataaactgctaacgccagacgctcttccgcacgaatggtgaccatgtttttaataaagtcatcttcgttctcagtggagagcagcacttcgatatccatgcgatcgaagatttgcgcagccatgttgaaggctccagtcaggaagttgttctgcgccatagcctgagtttccacaacaggaagaccccagatccgtggaacaccaccattgaccggctgcgcaatgatgtagcggccttcgttatctttggttaactcgatgcctgcccagtcaatagggttcagtacaaaaccagacgccggatattctgcaagaacggcctgcagaacagccaggcgaagacggtcgatcggcgtggcgttggacagggtaagcgctggagcaaattctgttgcctgcggcagaataccgaggatattcgcgccggtgccatcgccgctcagcaactgctgctcctctttaaagcgaagaccatactgagcacggccatcgatataactggccagaccgggcgcatcgtccaggatctgacgggacgctttaaaataatgcgcaatggtacgaaccggcgcacttttcagctcaaacttaatgtctgatttttgcttcagagcaccttccgccacagctgcagcattattggtaaaccccgtttcctgaacgaattcaataccgttagatgcggtattaccggggataagcagattacggatggtcagagtgcgttccggcggggcgataatgccctgaacacgatcggagaccaccagactgttggttgtgctcacgccagtgcccgtagtcgccggcacgttcataatatctttctgttccagcttgacgcggatgctcttacgggccgaactgtccatgcctttgaactcttcactttcgaccaccagctcaccgagcgattttcgctgtgcaggtgcatcgttcgggcggcgtgcacctttttgctccagctcagtgagacgttctttcagctcgttcatctgattaatgctttcgtccgttctttgtttcagttccagcgaaacggtttctcctgcctccatttttctcttcacgtcttcgccgaagtttttgacctgatcaatcaccatggtgagctgggaggagatttcgccaatactttgtggctgatcgtcagccgattttttctggtacatataaatcccttagagaatttttgggagagaaaactggctcagttgctggcgcatcgccgcaatagccgctttggtttcgccgtcttcgcccccggactcactccggtcaagcagataggacagtccgcgggaggcgaccgcggcggactgacttttcgagaaacctgcctctcgcaggaacttctcaaattcaggtaaggaaggaagatcaccgtgtgacagcttcgacttaatgacgtcaatacgcgcatcatcattggccggcacggtaacaatggagatttcaaccaggtcgagcttcgttaaggtgcggatccgggttttctcatcgtaatttgactcacggacgtaatagccaatggaaaggcctgtaatggcacgggttttcatgccccgccaggcggttttcgcgtaggccgcgtcttcaagccacagggccccttcaccaaaaagcccatgtttatcttctttcagggtcgagatgtcccagttcccgatgggttcgccggtgcgatgctgccagagaaccgggaacgttctccccttcgcccgtgtttcctcgatgctttcgaggaacgcacccggcgccacgacttcgttgtagctatcgacaacatcgaagacagaaccgtatccagaaaaaaggccgtcatcgttgacggccttaatatcgaagttgaatgcctttactttcatggctgcgtttttccggtacattccggcgtctcctctgatttaatgccaagccattcccgcagtgcgtttttggccgattcactgtcgccggacttgccaagctgatctatcggcagcaggttagattgaacggttagttggtcagcgccaggttttggctgaaggttttctttttgccgtgcttcattgcgagtcatcagaccgttctgggtcatcgttgagtaaaaagcggcacgggcggcgctgtcggcacgtaagagaccttcgatggaaaactctgcgaagtacttatttctttctcccggagccaggaggcttttacgaatcgcctgctcaatacgggtaagccatggacgaagtgaaaacgttaaaaagccaatcagcatctgttcgacgccacttccccacattgtctgcccctgggcactgtgtccaatcaaccccggccatactctgaaccaccgacaaatctcttcgatattgaatgccctggactgcagcatctgggcgtcttccgggttgaggtcaactggctgaaacttcattcccgcttcaagaaccatcattttcccggtattcatggatccagaaaattgttcaaccatgctttcacgtacttcattgcgctgctcttttttcaggatttgatccattgagagaacgccactgggccgcataccatttttaaaaacttttgcgctggcttcatctgttgccattgccagaccaagtgtctgtcgggcataactgacaggtgacaggcccatgacaccattggtgctgaacgcacggatgtgcatgatgtcccgttcattaatgtttcgggatgtacctgaaggccagtcacggtaggtataaataggatctccgctgctacttaaatcaaccttcatcctttctggcctgagcggtacaagcgaggtaatacgctttccggtacggtcgatttccgcgtaagcattcccccataaaagaaggctggccatgatcatttcccagaactccacagcggtcatgtcagcattcggctgattatggaggagctcataaagcgggtgatcatttgcactctggcgaccatcagccgttttttcgtaaaaacctacaggcaaagtcgcgatggtttcggataacagccttacacatgaccacactgccgataactgcagggctttatcaaccgtaacggatttgcctgctgcggactgcccaccagcataagcagcccagaattcaccgtctgtaagtgagatgggtacgccgagccaccggcgaacggcgctttttatccggcctggcttcttatctttattcatggtgactcacacaatgatgggattactgaaaaagtcgtcgatatcgccagaatcatcctcatagccttcggaggcaccgattgccatagcgcccgctacaatgccgtcgatacgcccggtactttttttcttggcaaaaattcggttttctttctgatcagcctccgtcactgctgaagccgcattccagcgaagacaagggttcgtcctgatgataatgacgctgtcatcaagcaactcttcaaacaattcgatggagtgaggcatccacagcccggaatctttcgctttgtaatacccttgcccatgagggattaagggaacagaaacagatgcttcctcaagctccggctcaagatatttaatgcgatactggtcgaaggcgatggccttgatatcaaacttctgagtcagatctgcaatgcgctgggcaacaaagccgtatttcactgctttgccaggtgtggtgtggatgtggccatctcgctcccaggcgtcataaggtacccggtccgttttggcccgttccagtaacgtatctttcggggtccagaactccaccagcaacttacgttgttttggaaaaaacaacgccagtgccgtcaaatcacgcgatccggacaggtctaaaccgccatagcattcctcaccttccagttcatctggattaaagctctcctcacaacccatccagacatcactgctcatccacggattagccgcgtcaacccactgacagaagttaagacgtctgacgatgctctctttcgatggcatcccgcgggcctgagtcacctgctcacgaagatagctttcttcaaaggtgtgacccagcgaagggttagctttcttccagcaggactcatccttgaaaggatcgtctccttcatccagagaacaaatgaaggcaaaaaagctgtcatcttctatcgaaccggcagaaacctttcggccgtattcgtgatagtcatagcagacactcgttttatcgtgcccactgttggtgatcatgaaaatcagcgcctgccgacgacctttggtaccggcacgcatcatttcaacaacctgattgcttttatgctcgtgaacttcatcaataagagcacaatgcggtcgcgggccggactgcccgtcatctgaactgattggacgaaagaaggaaccagactgaagaaaagccaggttccattccttcccggcaccacctgatttctgaatacgtgcggaaagagctggagactgatcgaccatcgccaccgcatcacggaaaaggaccattgcctggtctttcttcgtggcagcggcataaacttcagcgcgtgcttctttatccgcagtgagacagtaaagccctatacccgcagacagaggggatttaccggatcccttcccggactccacatagaccattcggaaccggcgaaaacctctggcgtttttccagccaaaaatcgaaccgacgatgaagcactgccatggcagcaacacgaaaggctcgccttcgaaatcaccaccattgagcttcagaactttcgcaaaatagtcaatcgagcgttgcgccgcctcaacatcccagtgcagaccacgggcatgacatgactgcagatcgttaaggtggcgctggcatgagttacgtatgtcaggaccagccagttctttgcccgaggttacatccatcgcatattgggttgcaggatcaaccgaagaacttgtcgagcgtgtcctcttcggggtcttcgccattcactttcaccttcgtccttgccgctggcgtaagaccgaattcaaccaggtaacttttaaaacggcggtcggcatcggccaacatcgaaacggccgggttagctttgataagaaaaccaccctcggtctggacggtataggttcttccctctactgcgatggtgtcgcgcaactgaaggatatcagcgtaaatatcgcatagccgttcaagggctaaggtatcggcaactgtcaacacccccatcccgtcaaggagaacagtcaaccttccccaggcaacctttccccagtcggtcaggtgcgccggcgggcttggaatttctcgcgccggagtcggttctttatcgttgagtttacgtttgcccgggttgccggagaccactttgaggtgggtcggtttcgggcgtcgtcctgccatcggaacctcccggaaaaaaacttttcatttcgcggttgtgcacaaaaaggatgggcggcggtcatttagggtcagacttctgaacttttgacccgcccctccctctgtgcaatagacgtcatctgaaccagtgagagtttggatcaagcggaataccattttcatcgcagccgatagcggagccgcgcttctccattctctgcttcgttgagtcatggtgctgcttacacagcccttgccagttcttccggctccagaaaagcttttgcgccttcgctattgcctggctgtcaccagagcgcaaagactcttttaatttgtgcgggatgatgtgatcaaccaccgttgccgctgtcaccctgccttgatcctggcacatgacgcataatgggtgcgctcgaaggaatataagacgctcgcggtcccatttgctgccgtagatgcgtggctcaatgttcatgctctggtcctattgcttggatgggcgaacgatcctcacctgaccgatcaatgtctcccgcttaacctcgccgttctcgacagtgaaatgactatgactatcgcgcacagtggcaatcacctcacctctttcatcgtcagcagaaaagcgtgctttacctcaacgccattgagataaacttcgatacgttcgcgaccgggttcgatgctttcgcccggatcgtcgtcgagaactgtcaggcgcatattcactccaaaaaaaagccaccttttaaacggtggctttttgagaagataaatgtttaaccgaaatacttcctgattgctgcgataattctttcatccgctatatcagctgaacacttcgcaatcaaatattccttttcatcaagcgtaaatgtttctatcggcataccaagttgtgcaccttggtccccgtaataagtcacgtagttgtcatcatctgcgacggaaataagatctacctgatcacctggaagtaacgaaatgacctgttttgacataagccctccgatttttaagagcttcaacattatcacaggcactcaatgaatacctgctgtaatgcctagctggactgttcagcagttgtatcaaagagcggcagcgcttcagtagcttcctgcactgctttcatcgtctttgctaccacttcggtttctgtcgtgacgcggctgtattgctggatgaaaagctgatacttaagtggactatccagaacaaactctacagcgactttagctgctgctgtgtcgtagttcagggctgatagcaggttcaggcgaatctgctgggcgtcggtgatttctgccatgtcttacctctatgcgatgtgggaagctttatccaaccacttcggaaagtggctccgtaatgccattaaaaaagccacccgaaggagacctttgtgagggagactttgaaagtaacgattaccaagagtctgaagcggtttactgttcttctttcaagccgatacccagtaaaggatcatgggttctaatttttaatacttctttatctgcttgttgatttgttatatcgccagctatatatcgggtttgaatatcggccattttttgatagacaagagaagcttttcctcgagctattttttcatgcatccgaaccgtggacacaaaaaactcattcaatgcaaaatatgtcttttgaaccgccacaaaatcatgctctgaaagatcgtcgctgttgtataacggtgctctgattaatgcaacattgtagttatatgcagaaactctaaattcttttagctcaagtgcttcctcatgttttctccagcttctgattgccagtactgcaattatagccgcaaacaaagtagctaacgccgatagccaagtgccaatcatcgaccaaaaggcccaatcagcagcttctcttgcggcaactaatgattcataggaaatgtaatcagcgttcatcatcacctcaaaaattatctgaggtgattgtaacggaaaataatattgaagccacttggctaatgtctattgttatgattaacaatcagcatcaggacgtgcgactgcacggcatgcccacatacaggcttcctgcattttggtgcgcgcgatagacaggctgcgcatagcttcatcaatctcccgagcctgctcagcgcttaacattgccgggccattacggacagccaacaattcacctcgctcggtatcaagcaaactacagaaatggcggctgacgcctttaaggcggttcatacgctcaatgtcgccagcggttaatgtgcggtagccttttacagtgctgccgtcctgcggttttgcttcactcatttcgtagcccttttcggatgtgggaagttcgccaacaagtatctggctcactaaattaaaaaacctcggagaccgaggttttagggaaggcttgtagtagcttatttattttcatacatagaaattagttcttcaggttgaactaaaatttcttggccaatatgcgttgctctacagccaatttcccttgcaactttttcaagaaaccaatagttagttatgaccatatttttgacttcagaaactattggtctgaactcaatctcccatccctgaggattttgcaaacagttgtaataaaagaagtaaatttcctccgccttccagaaatcggaataagatcccccgtcaggtttaacacaatctgaaatggcttgattgtcgaatgaacggccatccgaatgctgagcgtacattccagcataaagaatgactaatctttttctcgtgtaatcaatgacatcttcgattgaagacatttttactgcatgactcacctgaacatagctatggtgagtattttctgactctgggatccttatcccaataactcttggcccccacccatacaggtacgcagccaaccagtgcgcggcttcatgctttactgcagggtaaacacatctttctaaaaattcctgactcagcataagttaatccctagaatgtgattaatcatatgctattttaaacgctcctcaatgaatgataaatcaccacaatgctctgaaacttctagctgaatatctttcttaagaacaggcgaactactcaatcggtcatgtttgattagcattaaatcagatagaaccgccgataaatcaaaacaatcatcttttgaaagcaattcatttttatccacacttcacctctggcagttcgctagcacagattcgttgtgcgccagaatgtcgcgcttcgtttgtctgtccagcgcgtcgatatcgtgatcagtcaggtagatgatccgcacccagttgcaggcggtatcaaccaccaccggggcgggtaaatctttcgcgcagctcccgatcaacatcgtcatcaggcatatggctaacagtctgctgtacattgctggcctctctggtggcttcctctttccgttccgccgctgcgacgctggcagcggcattatcttcggtgcgctgctgttcggctttagcttccgctttattagtacctcgcgcatggcctaacccaaatgcgccagcgacaatggccagcaacgcagttgccagaccaataatcatttcaatgcccatgaggacctcacaccagaacagatttagctttcaggaatcgggcgcgtcggtcatcaatgccgttctgaccaccgttgataatctgagttacgcgaattaaatcgccggggtatttcaagcagccgtttgaggtatagaaccatgcggcgctgcgggctgcgttaatatctttctccagcagttcagggttgctgactaaatccagtttcagcgcattaccgcacttcatgtaattttcgaggaaggtgatcccgataattccacgtccacggtatttccagccatcgcccgcagccttattgccaaagcgattgctgtagaccagatttgcgatggctcgttgacgttcgatcggcaaaaccttttcgtaagttttacgccccagggtgttcgcctggtcctgcgtgatgcgctttgccttcacaaaaccagacaggccagcaacgctatagttaaaactttcgaccaactgggtaaatgacgtgctttcgtgtccacattgcgctatgaacatcgcccgatcgagaggactaatgatgctgaattcgttcattgcagtatcaatgtgcggaaaccagcgcgcagctaacccggcgctgataccagccgccctttgaaattgtgattggttcatcagtgcctcagtgcatcaaccagacgcgctacattccccctgaaccagagaaccgcgccgcagataagaatgttcgccagcaccaccagccagtgggatgactcgtacaggccaaacaggaaacggaaagggatgctggcgtaaaccagcacagtgaagtaagccatcagcgaaatcatggggcggtgtcttgacccgtcgcgccggtagaacatcagcacaacaacaattacagcgcatatcaccgcattaatgattgcgctcggatcacttgttaccattgcttgtccctcctccacgtaagcgagagagaatcccaaacaggctacccaggtcctgactgtttacgaaagtcagcagttttatagctatggctgccacgattaccgctccgagtgcatcaagcggcctgtcgttgtaaccagtccactttgagaagtacgaccccagcagaggagcaccaatcacaccgaatatgaatgaagtgatgaagtagcccaccagctttatgcggctaatattcaccgccgttgcgacatagaacaccgcaccagcaaacgcaccaaataccacgccgtaatcaataccagttgccaggccgaaaaggctggcgccgaacagtccaccagctgctatcgttgtggcagaaacaggatcggacatttagccccctctattgctgtgagtcctctcatgaacgaggggaataaaaaaagcctgctcaaaatgaacaggctcaagaaatatgactatcgaggtttgtggtgccgggtgcctcccggtgaggatgccccaacagacatcactcgcgcggtattcacagggctttcgctctattagttggacgcccctccgcatagggggattcaccacacggataatttaggatgtagtcataggcggcgtcaataactgacactctgtcaaaggcaccattacgatgccttttgcacagtgctaatcactggctctaataaggggccagagcaaagcgattaccccggctaccagcacgccatcagccaggattgacatcattttgctggtgaagtcgatagcaaccaccagaaacaaaagcaccccggctgcggcccagcgaagtttaccgatcacaggtactggtccagaggaagttgcagagcttgggcaattttcttcagctgtttctcttcttcttccccgataccgtcgttatctgctacatcaagacacaggcaaagtacatcgacagcgtcatccgtcccggcaacgtcagccagttcgcgcaacgcctgagcgttggctgaacgcggtgatgcttcgtaacgagcgcgaatattcgaactcatctgggcaatttcaccagcaaatggcgcaaatgccgggagggccgaaatagtcttctccagcactgcaatctcttttgcatcgcaggtaccatcggcgtatgcaatcgagtacgccccccagaccgtggcttctacagcatcgcggttttccatttttttcacttcaacaacggctttacgggctttctttttaaaaataccaaacatagtgactttccttttagcgggtgagccagcgctcaggaatgatcagcccacagagacagtcacactgactattccctatggctcacccctgaaaggctctgtggttatataacgccgagcgtggcgcagatacgaaaaaggcccgcaaatgcgagcctggtggatccgcttactgatacggagcgaccaacctaagttgtcgcagattcaaattgtggccctgccttttagtcactttgcgtgcagctgggacatgtagttttcgcatcgtgatcgggattcgcttcagacgctggccccgctgccatttaagtgccggttacgtttatccggcggcttccgcccggtttagccctaaggcaagggatttggttgtggtggtaggtgctcaagcaaattgcgtatttcactgaccgtctgttcaaaccgctcggtttccagttcaacaccgattccactccgcccgagcagagcagcttgctttagtgtggaccccgaaccagcaaagaaatcagcgacgacatcccctggccgactgcttgcagaaatgatctgctgaagcatatcggcaggtttttcgcatgggtgcttacctggataaaactgaaccggcttatgtgtccagacgtcggtatatggcaccgtgaccgacacgctaaatgggcgccgtaaccggtaatactcctgctgaagttcagaatacttccggttaagtgattgccaggtagcgacaagctggtggtgaggttttcccagttcgttgcgtgagtgcttatccatggcgattttttgaaacagagcctgcaacttcaaataatcgtcttcattcggcagttgccactggctaaggccaaaccagtgggaaatcatattttttttacccgtggcttctgcaatctgggccgacgtcacgccaagagattcccgggcatcccggaagtaagaaattaaaggcgtcatgacgtgttgctttaactcattacactttgcggcatatccatcgtctttgggcctgtatggcccctgataatggtcggcaaaaatgatacgctcagtggccgggaaataagcgcgtaggctctccttattgcagccgttccatcgccctgatggcttagcccagatgatatggttgagcaggttaaaccgctctctcaccaacagctcaatatccgctgccaggcggtgcccacagaacagatacatgcttccggcaggttttaacactcgccagaactgtgccagacagctatccagccaacgtaaatagtcctcgtcccccttccattggttatcccagccgtttggcttcaccttaaaataaggcggatcggtaacaataagatcaatggagttatcgggtagcgatgggaggtattgcaggcaatcagcattgattaattcaatactggatatttttacagtatttttcatagatcagtaagcgtaactctgataggctcactttgcttttgcgctaaagcagtgggccgtggttagcttgtgacctgaaagcatgagctgatggctggtcgggtgctacaacacccaccagccgcccattttcacagcaaaaacccccattactggaggcgcttataacatccgaactgataatcagataaccccgccattaccagctgcgtaagtatgagctggcagcgttcgcggcttaggtgagtattctgagcaatctccccagccgtagccggtttgtcacttaattcatcaaaaacagccttggctgtttccgtcatatcttgctgatttagcatgtcttttacctcaaataagtggtgtgacatacagataactctggtgaaggtatccagcaagaactaattgaaagagaagaagattttatcgattttagcccataaaaaaacccgctcgctggcgggttaatcaacgttgaacatacaaagcccatcgttatagataaaattacacaaaagcggcaactttgcaagtaacgtgtcgctaaattatgcgatatttatcaaatcagacacctttgtcacacgtttaagttgtgagtcggtataactctcttcctcaaagcattttgtaaccagactttcatagaaaggtttccagctgtatcgccaggtacgttctggcagaccaggcacctcagagagcatacccctgtaagcatttgaagacttaggacgactataaccgcggccttcacaacgtttacatactttgtagacaggcactccctgcagctctgactctttacggtccagggtttttcccgtaccgccacactggcatcgcttgctgattttcccggtgccgccgcatttgaagcagagaacatggtcaatctcttccacctgacgtttcacttcaaaatccgaaggtgactgcccgaggtcttttgcccattgcggtaatctcattttgtagtggcttttttccaccattgaggttttttttatgaagcctgaaccagaacacttcctgcaatctacgctgtcagctgcagacgaggcatagtcgttataagcgaaccgagctattatcagcatacacagcgggaacttcttccctgctgcttttcttatcgatcgaggcgcttttgattttgcatattcagccaaccaactgacggatgcctttctgtcgtgttcgctgattccagctttacccaaaaacattgacaggcctattcctgcctctgcctgtgtcatccccagtgcggccattacatctgtcacagtgagttgctcgctggcggttgcacgaccgctatcggaaatatgcattcctttgggcggaaatcgggcacgtctgtcatgcgatcattactcatggttttttaccctcatgaaaggcggctgcaaccgccggaattttctccatacacaacacagaagagcatctgcggttagcagccgcccgggtggattgggttatgagcccgtcgcccggtgatgctcttttgtcttgtgtaaaaagggcggtgccagaaacaaaggggaactgacaccgccaaactacacacagcacagtaaacaaggttgtggcggtggtgcctccacctgccggtattagccaatctcggcgacgtacactgcccggaaacgtactcagtgaacgggttggctcgtcacgtgcgcatagccgcagttaccacaacggtaagagcactgccgccaccccttgcgggataacccgtctgtctgcctggcggtagggcgtttcctggcatcttcagtgctctttcctgttgtgtccccgtatcttccggggtgtcacaccgtatcgccacgatggtggatcgctgtcgtgcataccgacactgacttgcacattccggttgtcctgagagcgcatggatcaagggactctcaggccgctaacgctgcatgtgccatacagcggttgtgaaaattgccgctcacaactggaagcgcactcctttagtaacaaaccagtccccacgaccgatgaaagatggaatgcgctttcatgttgtgtacgattcatctgccccggtccggcggcgccacctcgccggggcagatgcaaaggaccgttacgcgatcattcggcttgttggtatggccggaagtattaagtcccgacatcgcggattctgcttctccgccccgatttcacccccgctattgtttagcgcgcaaaccgagaaaatcgccttcaacgctgtcggctttcgccatgttcgttcaggtatcttcgggcggggtgctaaggtggtgatgagcccttgtccttaacactcctactggttttcggtattcctggcttgggtatcgccaccagttgtaggaattttactatgagttgtggttaatcagaccacacctctgttacccctcccgaagacacctgtcactttatgcgcctgcttttcaccacatcaggcgaggtggatcctggttattccccaacaacaaggattcggttaatctggatatccccaacaacgaagaggtgttgctatgagtgttattagcgaagaatttttccagaaaattcttaataatctttccgaactacacggtatagcagtgtttggttcagttactgaacccggctattcccaggtcaaaaatcgtgcttcactcgtatttgcacttgaagtcctacttgagcgacatcgtgaaaaacacggaaccttatggagcccgttacccggaaaactcgctttgttgcacttgatccttcaaaagtacaaatggccattatctgaaataaaggctttgacccttcaggagtccgtattcctccttcaggaagaattaaaatttgaaaaccttccggatctggctcaacgtgttctcaaaaattatttagctgaccgagctgaacactacttcgctgaaatacgagaggaagagtgggatccagatctgtatctcacaattccaaagccgcagcgatggtgagttcgtcaatgagttgatcgaccacttcgattgactgcttaagagcttctctttcggcgattgcggttttaagccgatgtgatgcactaattttccgttccatccaggagatgacctcttcctcggtgctgctaggagcaatgatttttggttcagttgccttcataaggcctccattcagttggttaacgtgttggggcatccagattgttaaagagccaagcgtcctacggggcgcttttttcatacctgcgaatcatcccggccttcgtatgccccgggcggctacttcgtgggcgtcctgcctgttcgcgtttgataaatgaaatctaaaataatttagtttttcggtcaaggtgaaaatgctaaatatttttagttttcaccattggaagggaaggaaagatgattagcggcgcatctggcggcggtgttcgacaacaacgccaatgatggtaattttttctacagaggagtttaagggggcaaaatcggggtttaacggaatcagttcaaagacttcttcaccgtcttcgttaatgccccttgcacgatatttcttaaacgtagcgtattcgctaccgttcttagcgacaacgtaatcaccagggccagggcagaggtcgggatccacaatgattgtgtctccttctttaaattctggctccattgatttaccccggacctttaaagcgaacgtaccaaatgaatgggcgccagttgttaggatatagtcgacagcaccttcaaggttgcgagcatcgctttctgaagtccatgtgccggcttgtacccaactgattatgggaacctgcatagcacccatagttgaagggcttacgttagaaacctcttctttacctgttaaaagaaaatcctcagaaacgccaaagtatcttgctagtttggtcaacgatactccgccgggaatgttttgatccttttcccagtagccgatagtcacatcagttaccccaacaactcttccgagctgtttctgagtgagttttctttcctttcttaatgattttaaacgacttccaaatgtgttcacggttgttcgccatttgccaaaaaactaaattatcttagctttaattgacctaaatttgtttcgtaagtaatatctaaataaatttaggaggatgtatgacaacaacagagttagagacgttctttggaacccccaataaggcagcagacttctttggtgtgtcacctgaagctttctatcaatggagaaagcgaccaggcggattaataccaaaagggcgcgctgctgaagctgcataccgtaccaatggaaagctcatttttcgtcctgagctatacgaaaagactaattcaattaagccgtaactggcaccacagacgtagggggtaagccgtgggtatagaacctgaatggaaagtagaaaagcaaccggcgtggctggtggccgcgattaaaaagactatcaccgaactggatgggggttatgcagaagctgctgaatggttaggcgttacagaaaacgcgctctttaaccgccttcgcgcagaaggggatcagatattcccgctcggttgggcaatggtactccaacgtgcagcgagcacaaatcatatagctaatgctatcgcacgccactccaacggcgtctttgttccgctcgctgaagtcgaagacgtggacaatggcgacattaatcaacgccttatggagtcgattgagtggattggaaaacactccagcttcattcgtaaagcaactgctgatggtgttattgatgccgatgaaaaggctcagattgagcagaacagctatcaggtgatggcaaagttccaggagcatgtagcgcttctgtttcgcgttttttgtactccagaaaagagtgacgcccgcgagtgtgcagctccgggcgtcgtggcgaataaatctttgtgtatggagaaataatccgcatgagcaatttaatcgtaaatcttcaattaccgcaactacggatgtacccgatcccgggcgtttcgtcgtttcggtatgagcgcatggtatgcggtaaatgggtcaagtgtaaccacagtcgggcacgcggagttgtgggggtctttaaccggagggcaaaagcgttatgcgagaagttaaccggaagttcaaagaccactatggcaatccagtcagagttatccgctgggagcctgagacacgtcgcgtcatctacctgcgggaaggctattcccacgagtgctttagcccactcgatcagtttcaacgcaagttcagggaagtagagggcagccatgagcagtaaattacacggcctcgtatgggaagcatgcgctttcaaagggctgataatctcagaaatagcggtcatggctcgcctggctgatttcagtaatgacgaaggtgtgtcatggccagcggtaaccactattcagcgacagatcggtgccaagagcgagaatactgtccgcagcgctatcaaaaagcttcaggctaaaggctggctgaagaagcaggaacggcgcgtgggcggaaagaataattcgaacgtttataaactcaatgttgagatgctggaacgtgcagcagctgaagcaaaaatcttctacgcaacgccacgtgaacaatcaaaatttgatgcctcagaatttgagggttcaaaatttgagggggcaaattctgatgcctcaaataatgggtctgtaccccctcaaatattgcgggaggacccctcaatggttgaaggcgatccgtcattagatccgtcattagatccgtcatctaaaaaaccttcttgtcgggctcctgcggaacccgacgataagccggatcctgaagttgttattaccgataacgcgatcgaagttctggcacacctgaatctggtcagcggttcccgttaccagaaatctaagacctcactggagaacattcgcgcgcgcctccgcgaaggtcataccgttagcgacttgaaactggtaatcgacgtcaaacatgagcactggcatggcaacgacgagcaataccagtacatgcgacccgagacacttttcggccctaaaaaattcgagggatatctgcaaagcgctatccgttgggatgccaaaggccgcccgccaagggagttgtgggacaaaaccagaccgcgggatgttaattcaattagtccagtacaaaccacgattccacgggggttccggggatgaacatagccaagtcgatctttgaatttattgagaagaatccaggcaaaatgctgcgcgatatcactgcggcatttcctgaaaccaaaccggtaacagtgaagagcactgttcatcgcctgtactacgacggggaacttgccagcgttgaagttactggtgggtttatctacttcgtagcgggatccatcgatattgaagagtacctgcctggtgggctttcgggggagattcttgcccttgaagcgacagccaaaaagctggaagagaaacgctattaccgccgtgcggcgacggtatggcagcaactttgtgacagcaactgtacggctaaagcaagagagcggtacctgcgtcttaagaatgcttctgttcgaaacgccagaaacatgaatgattccgccgggtcatgctatctggccggaaattactgcggaggtgacttgtgctccgattgaagaagattttgataagtctccggcgccttgtgcgtttgcatcactggcgttactggtggcagcacgacgttatttttcgcagaaaatatgcactcctcagaaatgaccttttcagctttgatcgccgttactggttactgagagcacttgttgatgctgatcagcgcaggggaaaactatgagtcaggaagtacaagaagctatgaccgcagaagagcaaactttaacaaaaaccatcaacccttattgcctggcacttgaggaacagcgccagcgcagtgcgcattatttgaaagaggttggcgatcaatggcggacaccagatctgctgttctggggcgttaacgctatgtttggcccgctggttcttgacctgtttgcagacgagagcaatgcaaaatgccccgcatggtataccgctgaagataacgcattaacacaggactggtccgctcaccttgaagaacttggtggcgcaggatttggtaatccaccgtatagccgttctcagtaccacgaaaaacaggcagtcaccggcatgactcacatcatgagttatgcatctgagcagcgagaaaagggcgggcgctatgttttcctgctgaagtcagcgacaagcgagacatggtggccagaagatgccgatcatgtgtgttttatccgtggtcgtattggtttcgatctcccgacctggtttgtgccggcggatgataaacagaaacccaccagcgccttctttgctggcgctatcgtgatatttgataagacatggtgtggggagcgctttagctatatcgatcgtatagagcttgaggcgaaagggcgcgcaagtatggctttggctgagtttgctgcgggaaaattcctgtcaccagcttcgccagttcagtctcctgaagtgatcatccccgatgctgttgcatcactagctgaggctgaatcccggatctggccactggaagttggtctcgtctttgaacagttacaaggcgcagaggatctggaattctcacagcagaacaagctgaaggcccacattaaccagttgtggctggagcgggtgcccaccagcgaaatcattaccgttgctggtggtcttgtcggcagcatgagggggaccgctcatgcgtgagctcatcgtagacaactttgcgggcggtggcggtgcatcaactgggatagaaatggcgatcggtcgtagcgttgatattgcgataaaccatgacgaaaacgcagtggccatgcaccgaactaaccatcctgagacgcttcattattgtgaaaacgtttttgatgttgaccccttggctgcgacaggcgggaaagctgttgggtttgcgtggtttagtccggattgcacccactattcaaaggcccgcggcagcaagcccgtcaaacgtgagatccgtggtttggcctgggtatctgttcgctggggattggatgtacgtcctcgcgtgatggctcttgaaaatgttgaagaatttaaaacgtggggcccgctactctcttgtgagatgcgtcctgatcctgagcgttcgggtgaaaccttccaagcatttgttggaatgctttctactggtatacctgaggatcatccggcgctgttcgaatgttgcgaatttctcgggatatcgccggatagcaaacaagccaaacggctgattgctggcctcgggtataaggtcgaatatcgcgagcttcgtgccagtgattatggtgcaccgacgatccgcaagcgattcttcatgttgatgcgttgcgacgataaacccattgtctggcctgaggcttcgcatggtgatcctaaatcggcctcagtgctgacaggtaaactggcgccatggcggacagcagctgaatgcatcgactggtccattcctgcaccatcgatatttgaccgcaaaaagccgcttgcagttaacacgttgaagcgtatagctcggggtatccagagatttgtggtcgatagcgataacccattcatcgtgaaatgcaaccataccacgacacgcggtaaatatgattgtttccgtggacaggagttgtattcgccaatacagacaatcaccaaaactcatggttacgcgttggcggtacctactctggcaccgtttatggctggaaatggtggtagccagtaccaagctaaaccgcgcccactcaacaaaccagttcataccatcctaaagcaatcccgagcatgcgtagttgccccggttatcgcccgccagttcggtgccagcattggccatcgggcagatgagcctagcgccacgattaccgctgggggtgggggaaagtctcagttagtcacggccacgcttattcagatggggtatggcgaacgggtggggcaatcaccgcgggttctaaatcttggtaaaccgttgggtactgttacagctgggggcaataagtttgccgtaacaactgcgttcctggcaaaacactatggcgggaactacaccggtccgggcgttgggcttgatgagccagctcactcagtgactacagtcgatcatcacgctcttgtgacatcgcacctggtaaaactgcgcggtacctgccgtgatggtcagcgcaccgatgaaccgatgccgacaatcaccgcaggaggtcagcatgtgggagagattagcgcgctgctggcggctaatgattacgatgagcgccgtgcggatcaagtcaaagagttcctaaattcgtttggcgtcagcgaactggtgacgattaagggcattgtttaccggattgttgacatcggaatgcgaatgctacagccacatgaactttaccgcgctcagggattcccggactggtacatcatcgaccgggactaccgcggcgtgaagtattcgaaggaaaagcaagttgcgcgctgcggaaacgccgtgccgccgccgtttgctgaggcgctggttagggccaatctgccggaaatgtgcgttaacaaacaggagcgagcagcatgatgaggttaactctcaggcagcaggaggttctgaacctcctgatcgagtaccaacgtaagcatggtttccctcctaccacttacgaactgaccggcatgttggggtgccggtcccccaatgccgcagcaacgcacctcaaggcgctggagagaaaaggggccatcaagattacccgcggagtttctcgcggtatcagtatcaccccttcgctgttggccagagaaatatcggtcaatctcaacagcatcgtaaaagtgaaacttactgccgaagctctaagttacatgagaagccagcacgaagagaatcgaatccagcacccggcgatcttcggagacttttcgcccccggtaacagacgaaaatggctatacgtcaatgaccctgtggagcctcatgtctgaccttggcccgctctgctattgcggaggagatgttccgtttgagttgaaaatagtgctggaggcagaatgaaatttattcttccattcccacccagcgtgaacacctactggcggtccccaaataaggggcccgcagaaggtaaacaccttgtcagcgcagccggccgtaaattcaaacatgcagtacgttcagcgatcattgagcaactgcgtgcaataccaaaaccatctaccgcgccagcagctgtagaaattattctctatccgccagactatcgccggcgtgacctggacaattacaacaaggcagttcttgatgctttgacttatgccggtatctgggaggacgacaaccaggtaaagcgcatggctatagagtggggtgagaatgttaaaggcgggcgggtagaaatcaccatatcggcgtataaaaaaacgctggatgtttgttcagtggtaggttgaagtctatgcaacttgccagtaatctcaaagggtgcaaacgaaacgggcgtgcaggcccgatcgtcacattaaagtgtatggagataaatatggctaaccatgttatgggcgtagctacgcctgtcgataatcaattgcatcaggtaattccggtaatgcagggcacaatcggcgatcagagagcttcgttggtcagcgccaggcgactgcataattttcttggggtcggtcgtgacttcagcaactggataaagtctcgtattagccagtacggttttgctgaaaacatcgattatacagttatcgccagttctggcgaaaacccactcggcgggcgcccggcagtggattacatggtcaccatcgatatgggtaaagagttagcgatggtagaacgcaatgaaaaaggtcgtcaggtaaggcgttatttcattagttgcgagcagcaggcaaaatcagcgataagccatacgcatcctgatttttccaacccggcgctagctgccagggcgtgggctgatgagtatgaagccaggcagaggattgaggctttaagtcaccggcaggctcaatatatcgatcatcttgaaaacctgtttaccgacggcttatccccagtgcagttctgcaaacgtctgaatggtgtcaacgttagtaaagtcagcgccttcctacagagcgctaactggctttacgatgacaatcctaacggcaatcacgctcaatggcgtgtcagatctcaggtcagggataagtatctcaccgagaagagcacaaaagtttcaccgagcgccgccgccagtttcacaacataccagcccgtcctcctgcgcgatggggctgtttggctttatcgcaagtatctgaagggacaactgccgatgaagcaatcctggaatagggaatatacccacgataaagagctttctgggggcattcagtgagagcattactgacccctgaagtcgtgtctcgtctcggtgttgttcttttcaaacccggtcgtgaattgatgcctctctttaccggcggccgtgtcctgatagagcgtcagccagagaagatgaaaacactgcccactgggcggatcgccgatgcacgtcagccgcttgcagaaatggacattctgcgttttttcatgagggatgagagggttattaacgcagctggtggaattaacgctcttgaggcctggcttctacgacatgtcagagagtgccagtacccgcattcccactatcaccaccatgaattagtgactatgcggcatccgcctggcgccatggttgtctgctggcattgtgataatgaattacgtgagcagaccaccgaaatgttgtcagagctggcttatcagaatctggctcagtgggtgattgaaagggtgctgatcagccttggatacaataaggagcgcgaattatcgatggcggagctctgctggtgggctgtgaaatccggcattgctgacgcaataaccgagacgatggcgcaacaggccttaagactacctgaggaacctttcctgtccgtttataaggatagcgatattgtcccgtcatttgctgcaggtgaaatccttcaggatcttgtcgagggcatagacctgacggacgccagtgtactcattgagcaacctcagagtgaaaataaacccattctgaggcttagtgtcgatccgaacagcccagaatcatttatgcgccgcccaaagcgccggcgctggacctgcgaagtttacacacgttgggttaaaactcagccatgtgaatgctgtaggcaaccatcagacgatccacaccatataatagggaatggtctggggggaactggcaccaaggcccatgatctcttcgtgataccactgtgcagagtgcatcacgatgaattacacgccaatacatcagagttcgaaaagaaatatggcactcagttagagctgtgggctcgttttctggatcgggtaatgggtatcggagtcattgtaaaagcttgagtgtatggagtactgagcatgaatattgaatcaattcccaaatttttcggaccggagctttttacaatcagctatttcaaagggttacatcatgctgattggttacgccagggtgtcaaccggggatcaaaacctcgatttacagaaaaatgcgctgatccgcgcagaatgtgagctgattttcgaagatacggccagcggaaagaatgccagacgaccagggttaaagcgtgcgctgcggcggctgcgaccgggtgatgtgctggtggtctggaaactggatcggctggggcgaagcgtgcgtgacctgatcactctggtatcagagctgcaggcgcgcggggtgaatttccgaagcttgactgacagcatcgataccagtacgccagcaggacgttttttcttccacgtcatgagtgcactggcggaaatggaaagagagctgatcgtcgagcgtacccgcgccggtttagcagcggcaagggagcaggggcgcatcggtggccgccgccggataatgaccacagaagttgtggatcgttgccgacggatgttggagaaaggggctactcggcagcaggtcgcggatgtgatagggatcagtgagaagactgtatataaatatttcccatcagaaagtggcgtacctgagaagtcatgaacgaatcagcccaaccccagatatcgctgcttaactctattgcatgagatatggcaggaccatagtccttataaattaatgttgtggctggaaaccagccacttttcgttgattcaagaagcatatagccatcttctcgaacttttataatagcgaaggaccgtaactcgaaatcaggcagtggtaacttcctctcctcggggaagtagatccttacccctgaaagtatggcgctgttgcaactgatcattcttttaccagccatagatctgcttcttcaaacatctcctcaagcatgcggtttagccgttctttatcatgtttgctggcgtctgagttaagagcatttgcctgcataggttttaccttaacttctgcatcaggaaaaattctgtgcacccgctttgttaactcattgagaatgatagaacgagcattagccaaaccttcaacattgcgcttgtcatatacgagttcaacaaacattttttcgatcctctttactgtgtttatatacagtatatatactgtgattatgtacagtgtcaagaaagaggagtaaaaccgtgggctttccatctccagcagcagattatgaagaaatgcgtatttcgcttgacgaaaaattcattaagcatccagctgcaacgcattttatgcgggcggcaaacacttgttatcgtgcgggtattttacaaggggctcttctggtcattgatgcttcacttaagccatgtgatggcactttgcttgtatgtgcaatggaaggggagttcagagtaaagcgctaccggctggtgccaaaacctcatcttgaggacttgtcatctgggcgaaaggaagcgcttccgggggaagaggagaattgcccgccggcagtatttggagtgatcacatacataatcaatgatgcgcggtcaggggagttcgacgactgccctgttatataattttaaggcgtttcgatccgtaatcaccttaacactacccattataaaaaccagccataggtggctggtttagttggttttttggtcggcaagtgaggttgagcctcttcccggaaatctgagataagttaggcctgtaccaacgcttcggattctgtgagtgaggtctgatagcgctgtactgtttcagcaaaggcttgcgcggcatctgcatttgataccatatattcctcagttaacccagtttgggaatggaaagtaatatttccataaatgcaaattgggatttggtagttatctttaaatcgacggtctggcgatccattcttattcgttttcgcccaagtatggccatctatacgtgtatccttgggaacaccgtcttcctcttgaaatctccgatgttccgcactgatttgtaattcgcgtatatcaatcagagcgaatgccccatcaacacgtggtatgactgcaactccaggataaagcaatatatcgtcgccattgacattttcaaaccgcatcgcacgacctgtaaattgaatgagatctgttgagctgtagtcaaaggtaacaggatgacgatccacagatcgagttgctaacgttctttcggcaaactggtctgtcgctttgtcagcagtgatatcccattttttgttgctagattttaacatatcgaatgcacggaccattgctgcatatgcgcgctgtgaagtgtcactgctctcgaaggtaatggctatttttgtgctgtcttcccatgataacaggcgagatatctcagcttgcgttacggggagttcagtctcaagttctgcgatgcgacgtttgtaaaaccaacgaagtagacttgatttgcgccgaaccaactcgttcttttgttttgattcttcagcaagagcttcttgtagatctgcttttatctctgcactttgttctcgtgctttagcaatcaaatcccgtaaaggtaaaagggaggagcttgtcaggacttctaccgaagcgctggaaatttcattcatgccagccatgggcatgtatattttagcgttcgatggagtgttgcttggaaatgattccgtcgacccaaaatgaggttctgtcgaggacggaattaatggattcgtaactgagtggcaatcatcatagggcagggtagatgtagtataagataagcctgtacccgggagtcccacagtcgccctgagtccttttttcccaacattgacagtcgcaccaggtaccccgatgcttgcgcttattccacgctttccaatgttgagcctcacaccaggaaatagagtaaaggtttgtctgaaacgaagagacataaagttatccctatgtagttttgtgtaccaaagttcgaaatgtttttatatgaacattgagctgatacaaaaaactacccttagctcatcttcataccgccatgataaagcgattaacttgctggtggagtaaaacaataaagcccgcgaaggcgggcttttttgtcactagggagccgcggctcctttgcgtatccttttttgtcccctcaccgtctggtcggtgtcctgctgagactgctaacttcctgttattgctagtgatgtcctatcactgtccaatcatgattggtggagctggcgggagttgaacccgcgtccgaaattcctacatcctcggtactacatgcttagtttgtctttacattcgcacgccagctgcggacagacacgccactaacgaactagcctgattagttttagcacttcaaccccaggcagggcatccgcgcgatctcttttgggtttgacctctcttgatccccgtcctaagagcggaggctagggagagagggctctaagcaggttattaagctgctaaagcgtagttttcgtcgtttgcgactatttttttgcggctttttacgaggccaaccgcccctcggcatgcaccttgggtttcgcgaatcccgtcgaatccagaatcagccccaatgtgtacttgaagtataacagatttatgaaggtggttaccagcccccgaagcgaggattctggcggcatatcgagtgaaaaagcagcgacaacagcaatatagcgtggggccagggggagctggcccgcagagagggggaattaccgcccggcgttcttcatgatgcgcgccttatcgaccgcccattcacgatctttcacgtcggtgcgcttatcgtgctgtttcttacctttcgccacgccgattttcactttgcaccaggcgttcttccagtacaacgacagggcgacgacggtataaccttcgcggttgatgcggccgtatagcgcatcgagctcgcgctgattgagcagcagcttgcgggtacgggtcggatcgcaaacgtaatgcgtggaggcgaccgccattggcgtaaagttggcgccgaaaagataggcttcgccatctctcagaatgacatagctatcgccgatgttggctttgccggcacgcagagatttcacttcccaaccctgcagcgcgaggcctgcctcgtattcatcttcgataaagtattcgtgacgggcgcgtttattcagcgcaatggtggctgatccaggtttgtgggcttttttcttagtcataatgtcctgaagtcatcgctagttctaaacattgttacctcaatccttcctgcgaggcgtaatgggctatcttagcacgagttacggtacagcgttttttttagcagcagataaatgatattatttgtcccgtgtttaaatgtggaacctgctatgcctcagattagccgtactgcgctggtgcctttcagcgtggaacagatgtatcaactcgtaaatgatgtgaagtcctatcccgatttcctgcctggctgcaccggtagccgagtactggaggccgggccgacgcaaatgacggcggcggttgatgtgtccaaggccggcatcagcaagactttcacgacgcgtaatacactgaccgataaccagagtatcctgatgagcctggtcgatgggccgttcaaaaagctgattggcggctggaagtttattccgctcagcccggatgcgtgcaaaattgagtttcatctcgattttgagttcaccaacaagctgattgaaatggcttttggtcgcatctttaaagagctggctgccaatatggtgcaagcgttcaccacgcgcgccaaagaggtgtatcgtgtcggctaatattgtggttgaagtcgcctatgcgttgccggaaaaacagtacctgcaacgcgtgaagctgcaggctggggcaacggtcgagcaggcgattatctccagcggtattctggcgctgcgcgaagatatcgatctggcgaagaataaagtcggcatctacagccgtccggtcaagctgcatgatgaagtccatgatggcgaccgcgtagagatttatcgcccgctgattgctgacccgaaagagctgcgtcggcagcgagctgaaaagcacgctgagaaataagcgggaaggcacaattaaaaaaagcgctcattgagcgctttttgcatttcaactggcctgagattacttggtcagcgccggtttgttataaatgttggttaacacaccgctgctgtcgaaggtcagcgtcagtgtctgctgggtcactttctcatgccccggctgctggcggaaaacgtagaaccaggtgttgctaccaaatggatctgacatcatcggcgtacccagcgcataagcaacctgctgttgcgtcatgccgacacggatttttgctacatcattaggtgccagatagttaccctggttgatatcaggacggtaaaccactcgttccagagtggaacagcctgcggtcaacataaggagaaccgctgcggcagcagtcagcgttttacagcgcatagtgatttgattcctttttgggcccgagcaatacgtggctcatctgtaatatgccgataataatagacctttgcccggttgggaaccttcgactgcaggtctattggcaatttgctgttcactatgactctgtgaaaatcaaaaagtttacgccgcaagcaactctttcgcgttcgccagggtgttgcgggtcacctcgctaccgcccagcagacgggccagttcctgcagtctggcgcgtttatccagcgcatgcatgtgcgtctcggtcatctcgccatcggtctctttgcagacgaagaaatgatggtgaccacagccagcaacctgcggcaggtgagtcacgcacatgacctgcgtggattctcccaactggcggagcagtttgccgacaaccgccgccgtcgggccgctaatgccgacatcgacctcatcgaaaatcagcgccggggtctccattttacgagcggtaataacctgaatagccagtgcgatacgcgataactcgccgccggaggccactttagcgatcggctgcagcggttgccccgggttggtggtaacgcggaactcaatatggtcggcaccttcggcggtcagatggcgttcatcaaaggcgacatcaatggcaaacacgccgtgaggcatagaaagtgagtgcatactttcagtaatcaactgggtgagttcgtcggcgctgcgctgacgcagggcgtgcagttcttgcgccgtttccagcgccaggcggtgatgctcaacgaccagctggctcagcgactccagcgaaccggcgctgtcgtccagcagacgctgctcatccagcatggcctgatagaacgccggcagctcttccggcgcaatctgatgcttacgcgccagcgcaatctgccgggaaatgcgctgttccagctcgaacagacggttagggtcgagatcgagacggtcattgtagtggcgcagctcatcagtcgcctcgctgagctgaatagaggcttcttccagcatatcgagcacgccggagagtttgctatccataccgaccagctcgctaaccagctgtttagcggtataaagctggctttgcaaattggcctcttcgccgtcggccagtaccgttaatgcatgctgacaggtactgagcagctggccgctgttggccagacgtttgtactcttcgtcaatctgttcgaactcgcccggcagaggattaaattcgttcagttctttgagctggtattgcagcaggtctgcgcgggcggcgcgctcctggctctgctgctgatgctgcgccagctcccggcagctctggtgccactggcggtagcgctccgccatgcgttgagtaagcgcatactcaccggtataaccatcaagcagggttttctgatgttcggctttggtgagtaactgatgggcatgctggccgtggatctggataagcaactggcccagctcgcgaagctgagaaagaggcacggcggtgccgttgatgaaaccgcgggagcggccgtcagcgctgatcacgcggcgaagtaaacactcacgcccgctctccagttggttctcttccagccagcgctgggcggcaggggtatctttcagcgcgaagcgcgcgcacaggtcggcacggctggcgccgcggcgcaccatgtcagcttcggctcggccgccgaggcacagccccagcgcgtcgatggcaatggatttcccggcgccggtttccccggtgatggcggtcatgccgctgtgaaaatcaatttccagttcacgaacgatagcgaaattgctgatggtgagttgcgccaacatagctgccttcctgtatgaaaaaccattactgtgttttcgtacagtatagactggttttttatccagtaaagaggcagcttgtaaaatcagaacaattttttcgaccagcccaacttagtgcttaatgtattgaaatagctgtagtctttcgggtgaatcagattgaggtgataatcacagcggcggatgagcacatcttcgccgtcctggatgggtagcgcaatctggctgtcgcagctgatttccagatcgttgcagcgctgcgagaagcgcaggcgaatggtgctatcgccgttaatcaccagcggtcgcgctgatagcgtatgcgggaacatcggcaccagggtgatggcgtccagagaaggggtgagaatagggccgccggcagagagcgaataggccgtcgaaccggtaggcgtggagatgatcaggccgtcggagcgctgggagaaggcgaacacttcatcgatatagacctcgaactcaatcatgtgcgcgactttacccggatgcagcactacttcattgatagccgtgctgatacgcttctggcagtcatgctggcacacctgggcttccagcagaaaacgtttttcggcgatatagtggccttcaagtacgtcggccaactgctggagcgcgttatccgggtcaaggtcggtaagaaaaccaagattgccgcggttaatgccgatgacgttgatgtcatagcgcgccagggtacgcgccgcgccgagcatattgccgtcgccgccgaccaccaccgccagatccgcctgctggccgatttccgccagcgtgccggttttaacattgctaagctggagttcatgggcgatttgctgctcgaccagcacctcatagcctttgccgcatagccagcgccagagcatttcatgtgtggtcagggcggttgggtgacgagggtgtcccacaatgccgatacacttgaaatggttcttcatgatctggatgtccttgggttaaatgaatgatgacaatctgtctgcttcccttgaatcccggaaactgatccccataataagcgaagttagcgagatgaatgcgaaaaaaacgcggagaaattcatgagtagtaaagaacagaaaacgcctgaggggcaagccccggaagaaattatcacggagcagcacgacaacgtagaggcggtagagcctgaggtttctgctgagcaggtggatccgcgcgatgaaaaaattgcgaatctggaagcacagctggccgaagcgcaaaagcgtgaacgtgatgtgatgctgcgcgcaaaagcggaagaagacaacctgcgtcgtcgcaccgaacaggatatcgagaaagcgcataaattcgccctggagaagttcgtcaacgaactgctgccggttatcgatagcctggatcgcgcgctggaagtggctgataaagctaacccggatatggcgccgatggttgaagggatcgaactgactctgaaatcgatgctggacgtcgtgcgtaagtttggcgtggaagtggttgccgataccaacgtaccgctggatcctaacgtgcatcaggctatcgccatggtcgagtctgacgatgtggctgccggtaacgtactgggtgttatgcagaagggatataccctgaacggtcgtactattcgcgccgcgatggtaaccgtcgcgaaagcgaagtaattcgttagttcgccagtaacggctgcctgcgggtggccgtttttattggctttaaataaaaaaacggcgaaccgaagttcgccgttgttctttgctggctgcgctattccgccacgctttcgcgtaatgatttcaccggcatcaccttcacctgcttaatcatattgtcctgtacgtcgagaatatcgatatcatactgttcgatacgtacgcgggttccagggaccgggatctcctccagcgcttccagaatgatgccgttaacggtacgcgcgtcgtcttccggcaggtgccagttgaacgctttgttgatttcccgcacgttggcgccgccgtcaataatcaccgagccgtcattaagcggcgtcacttcttcggcaagggtcggcgacatcgaggtggtgaagtctcccacaatctcttcaagaatatcctcaacggtgaccagcccctgaatatcaccatattcatcaaccaccaggccgactttctttttattacgctggaatttcaccaattgcgtgctgagcggcgtaccttccggcacaaagtaaatctcatctgccgctcgtaacatgatctcttttgtgaactctttcttttccgtcatcagccgataggcttcacggacgcgcagcatactgatggcatcgtccagcgaatcacgatacagcacgatacgaccatgcggcgagtgggttagctggcggacgatagatttccagtcatcgttgatatcgataccgacgatctcattgcgcggcaccatgatgtcattaacgctgaccttttccagatccaggaccgacagcagcatgtcctgattccgccgtgagatttgtgaacgggattcattcacaatcgttcgcagttcatctttactcaatgcgccgctaataacgtgatcggtcttaatgcccatcatgcgcatcagtacacgggtaatggtgttcaacagccacaccagcggcatcatcagtacctgtagcggcgccaacaggaaactgctggggtaggcgaccttttccgggtacagggcggcaatggttttaggtaagacttcggcaaacaccagtacgacaaaggtgagcacgccggtggcgatagccacgccggcgtcgccgtacagacgcatgccgacgatggttcccagcgctgaggccaggatattgacgaggttgttgccgatgagcaccaggctaatgaggcgatccggcttacgcagcagcttttccacccgcttagccgggcggttgccttgtttcgccatatggcgcagccgatagcggttcagcgtcatcatgccggtttcggaaccggagaaataggcggagataatcaccatgatgatcagcgtgacgatcagcgtggtggtagaaatgtgttccaggagagactccttagtctttaactaacaaactgctgaaggacgcggctgccaaaataagccagggtcagcagcccggctccggcgacgttaaaccagaccacccggcggccgcgccagccttcgtggtagtgcccccacagcagtacgatatagaacaaacagggcacgatagacagcaccgctttatcaatattttcggtattaaacaggttgtgcatatagaacaacccggtgcacagcgtcagggtcagcagcacgacgccaacctgggtgatatgaaacattttacgctcaatactcatcagcggcggcatttcgctgctgaaagccagctttttatttttaagctggtagtcaatccacgccagctgcagcgcgtacagcgcggcgatgataagcgtggcgtaggcaaagagcgacaggccgatatgcaccaacatccccggggtggtttcgaggtgggtgatgtactcgttaggcacgaaggtggcgaaggcgagattgatcagcgcgaaggcgtatacgatcggtagcaataaccagccgcgattacgcgaggcgacgatggtcatcaccgtacagatcatcaggctgaccagcgagccgacgttaagtaagctgagattttgcccaccttcgccgccggggaaaatacgtgactccagcgcgaaggcgtggcaaatcagcgctatcgtcgcggagagaatcgccatccgccgccagctgctgtttttttgcagcaggccagggatgatcagcgcaaggctgatggagtaggcgacaagggcaagtagagcaaacacaggcataggagcgtcgactgttgactaaataagaaagagaagcagtatagcgtcacgcgacgtctgctccaaccgttgcagcacattcaggtttatgtcgtgttatactgcgccaaattcgtatttttgtgtcgctgcggcgaccgaccgtttccacctcaggcgagagacaatgtttgataatttaaccgatcgtttgtcgcgtacgctgcgcaacattagcggccgcggacgccttaccgaagacaacattaaagacaccctgcgcgaagtgcgcatggcgctgctggaggccgacgtcgcgcttccggtggtgcgtgatttcatcagccgcgtcaaagagagcgcggtaggccatgaagtcaataaaagcctgacgccaggtcaggagttcgtcaagattgtccgcaacgagctggttgcggcgatgggcgaagaaaaccagacgctggatttagccgcgcagccgccggccgtcgtcctgatggcgggcctgcagggtgcgggtaaaacgaccagcgtcggtaagctgggtaaattcctgcgcgagaagcacaagaaaaaagtgctggtcgtttccgcagacgtataccgcccggcggcgattaaacagctggaaacgctggcagagcaggtcggcgtggatttcttcccgtccgacgttggccagaagccggttgatatcgtcaacgcggcgctgaaagaggcgaagcttaaattctacgacgtgctgctggtggataccgccggccgtctgcacgtcgatgaagcgatgatggacgaaatcaaacaggtccacgtcgcgattaatccggttgagacgctgtttgtcgtcgatgcgatgaccggtcaggatgcggcgaataccgcgaaggcctttaacgaagcgctgcctttgaccggcgtggtgctgaccaaagtagacggcgatgcccgcggcggcgcggcgctgtcgattcgtcatatcaccggcaagccgattaaattcctcggcgtcggcgagaaaaccgaagcgctggagccgttccacccggaccgtatcgcttcccgtattctcggcatgggcgacgtgctgtcgcttatcgaagatatcgagagcaaagttgaccgcgcgcaggccgagaaactggcatccaagctgaagaaaggcgacggtttcgacctgaccgacttccttgagcaactgcgccagatgaaaaatatgggcggcatggccagcctgatgggcaaactgccgggcatggggcaaattcccgataacgtgaaagcgcagatggacgacaaagtgctggtgcgtatggaagcgatcatcaactcgatgacgatgaaagagcgcgctaagccggaaatcatcaaaggttcgcgtaaacgccgtatcgccgccggttgcgggatgcaggtgcaggacgtgaaccgcttgctgaagcagttcgacgacatgcagcgcatgatgaagaagatgaagtcgaaaggcggcatgatgaagatgatgcgcgggatgaaagggatgatgccgccaggattcccaggccgctaatacgcgtcataattcaagccgcagatgcgttggctgcgttcgttcaccccggtcacgtacttgtgtacgctcccggggatttactcacttgccgccttcctgcaactcgaattatttagcgtatgtagttttgaattgatttttgcacagaaatcagtaaaattttcgggcttttaatatgacaccgggctccgttcctcgatggggcccggttgttttattcacacaagaggatgttatggtaactattcgtttagcacgtcacggcgctaaaaagcgtccgttctaccaggttgttgtcaccgacagccgtaatgcacgcaacggtcgcttcatcgagcgcgttggcttcttcaacccgatcgctaccgagaaagaagaaggcacccgcctggatctggatcgtatcgctcactgggttggccagggcgctactgtttccgatcgcgttgccgcgctgatcaaagccgctaacaaagcagcttaatctgtcacggtggtcatgatgagcaagcaacacaccgcacaagcacctgttgatccgattgtattggggaaaatgggttcttcctacggtatccgtggttggctcagagtgttttcctccaccgaagacgctgaaagcatttttgactatcagccctggttaatccagaaggcgggtcagtggcaggttgttgagctggaaagctggcgccaccacaatcaggacatcatcatcaagctgaaaggcattgacgatcgtgatgcggcgaatctcctgactaattgcgaaattatcgtggattcatcgcaactgccggcgctggaagagggcgactattactggaaagacctgatgggttgccaggtagttaccaccgaaggctatagcctgggtaaagtcattgatatgatggaaaccgggtcgaatgacgttctcgtcatcaaggcaaacctgaaagatgcatttggcatcaaggagcggttggttccgttcctcgatgggcaggttatcaagaaagtcgatctcgctactcgtactatcgaagtagattgggatcctggtttttaaattctccggataaacggtaaaagacggcgctatgtggattggcataattagcctgtttcctgaaatgttccgcgcaattaccgattacggggtaactggccgggcagtaaaaaatggcctgctgagcatcgaaagctggagtcctcgcgacttcgctcatgaccggcaccgtaccgtggacgatcgtccttacggcggcggaccggggatgctaatgatggttcaacccttacgggatgccattcatgcagcaaaagccgcggcaggtgaaggcgcaaaggtgatttatctgtcacctcagggacgcaagcttgatcaagcgggcgtcagcgaactggcaacgaatcagaaactgattctggtgtgcggtcgctacgaagggatagacgagcgcgtaatccaaaccgaaattgacgaagaatggtcaatcggcgattacgttctcagcggtggtgagttaccggcaatgacgctgattgactccgtttcccggttcattccgggagtactgggacatgaagcatcagcaacggaagattcctttgctgatgggttgctggattgcccgcactatacccgtcctgaagtgttagaagagatggaagtaccgccagtattgctgtcggggaaccatgctgagatacgtcgctggcgtctgaagcagtcgctgggccgcacctggcttagaagacctgaacttctggaaaacctggctctgactgaagagcaagcaaagttgctggcgcagttcaaaagcgaacacgcgcaacagcagcataaacatgatgggcaggcgtgagcccccaatatcagtttacccaggataagagattaaattatgagcaacattattaagcaacttgaacaagaacagatgaagcaggacgtaccttccttccgtccgggtgataccgtggaagtgaaagtatgggttgttgaaggttccaaaaaacgtctgcaggcattcgagggcgtggttatcgctattcgtaaccgcggtctgcactctgcattcactgttcgtaaaatttccaacggcgaaggcgttgagcgtgtcttccagactcactctccggtagttgacagcattgctgttaaacgtcgtggtgctgtacgtaaagctaaactgtactacctgcgtgagcgtaccggtaagtctgctcgtatcaaagagcgtcttaactaagattcgctttcgcgacatcctgatagaaagggctggccagatggctggccctttttttatctaaattttaactattttgatgtaaatcaattacaatatcgcccggatttcggaggggcggtgaacggcactattttttcacaatcagcattgcaacggcgggccgcctggctggcgctgtttgcgatcctgctgatcgtggtggcgccgctgatctccgtttcgctgcagaaagatcccatgagcgtaatgccgggcatgcatcatgctatgccgatgggggagtctcatgatgggatgtccggacatgagatggtaatgatgcacggcgctgacagcgcgtcgcagccggcgcatagcatgccggtcgatcacgccgaagcttgcggctattgcgtgctattagcgcacgtaccggggctgctgttcgcgctggcgctgttcttcgccatgatcctgcggcgtatccgcctgccggcttctcgcccggtattaaaacactggcactacttcccctggctctaccctgaaacccgtgcgccgccgcggctgtctgctttttccctttaataaaaatgaatctgcgtactgcgcaacgacctcttttgctttaaaaaaggaagagtatgacaacctgcacctcgcgcgcggcatggttaaacctgctgcggcgcctccatttctatattggtctgtttatcggaccatttatctttgtcgcggccttgaccggtacgctgtatgtcgccacgccgcagctggaaaactggctgtaccatgaggccttacagggctcgctcaacggcgaaagacagccgctaagcgcgcaaattgccgtcgccaaagaggctacgcaaaacaacctccgcctgcaggccgtgcgcccaggtattaccgccggcgaaacgacgcgggtgatgtttgccgacccgcggctgggggaatcagaaaaccgggctatttttgttgacccggtgacgctacgggtcaaaggcgatctgacggtttacggtaccagcggtattttaccgctgcggcagtggattgattacgcgcataaatccttgctgttgggcgacagcggcagactgtacagcgaactggcggcctcctggatgtgggttgcggcgttgggcggtattgcgctatgggcgatgacccgtccgaagcggcggatacacaatcggctgcaaaatacccgccgtctgcacgtgacgctgggctggatgttactggtcggcatgttactgttttccgccaccggcttaacctggtcgcagtgggcgggcggtaacgtcgataagatgcgcgccgcgtttggctggctaacgccgcaggtcaatacgcaacttcatggcggggaggcgatgccgcccgatccgcacgccgggcaccacatggcgcatatggcaatggatgagccacaggtgaaagtgactgctgatcggttcgatagcgtattacaggtggcgcaggccgcaggtctaacggccagcaagctggagatccggccgccaaaaagcgctggaatggcgtggacggtgaatgaaattgaccgtagctggccgacgcgggtcgatgctgtggccatcgatggccagacgttacaagtcgtggatcgtacccgctttagcgatttcccgctgatggcaaagctgacccgttggggcgtcgattttcatatgggaatactgttcgggttggcgaaccagttgctgttggtggcattcgggttggccctgtgcgtcatgatcgtcgtcggctatcgcctgtggtggatccgccgtccggcacagagtgcgtttaatcctgcacaaacgttggtgcaagcgtggctgggactaagtgtcgctgcccgggcgcttgcgctgttaatagcgctcctgctcgggctggcggtgccgctgatgggcgtcagcctcgcggcgtgcctcgtggttgattacctgcgctggcgcgcggcttcagcgatgaggctggctaagtcggtagactaacgcgcttaaggcgtgctgatcaccacggtaacacggcggttttcagcacggcctgccgcggtattgttgctggcgatggggtactttttacctaacccgcgggtggttaaattactgcgcggaattttcgcgccttcagcccaggcatccgccacgctgttggcgcgctttaatgacagcgcttcgttgtagctgtcttcgccgtagttatcggtatgaccttcaagacggctatgggtaataccggtttcagctaaccgtgcggccatactgtggatttgctgctggctgtcgggacgcaggcgatagtcgtttttgtcaaacagaatgctgtcagacaaacctaaggaccaatcaccggcggcttcggtaaagccgtaagacttcattgctgcgacctgttctttcgagaacttacctggcgcctggcacccagtgaggagaaaagcagccagaagagtgggcgcaataaattgcctgagcatagtcattccttcttatttttgtgtgtgatgaaaacgctggtttttcatccgatacatattctgatcggccagttcctgcagctcctccaccgaggtgtgttcccaggtcaaagcatagccaatactcaaagagagcgttgccgtgtggccattgtggaggttgaatggctgaagaaactgttcggacagcgttgcgcaaagcgcctggacttcggtttcggtatgcacatcgtgcagtaaaatggcgaattcatcgccgcccagacgccatgcctgatgttggtcgccaacgaatgccatcaggcggctggcgacctcaataaggactttatcgccggcagcgtgcccccagttatcgttaatgagtttgaaattatcgccgtcaagaaacagcagcgccgaactatgacgtgccgcgtcatcgtccattagcttaccgatgacgttgcgaaacgccgcgcgattcgccaatcccgttagtggatcatgcaacgagctgcgcagcagttgcgcatttttcgcctgcagttgacgctgccaatcctccatttctcccagcaggctattgaagtcctgggcaaagagatggaattcctcaatacgttcttccggtacacggcgcgagaaatggcggttttcgcggatatcatgtaccacttcggtaatactttgcagcgcggcgacaataccgcgatgcagagaatgggtaagcatcagggcgataacggacgccagcagaatactgccggtcaaaacgatcagcgaagtaccgagaaaatgactaattaaccgatcgagcgccttcagacgaagttcaccgattattttcccctgatgccagattggctggacagtcggttcaggaaacagccatttactaatataaccactgaatttttcgtttttaactaaggcgtcattacgccagtcggcgaaatgacgctgatggctgtccagaagcgtggcttcggaaaattgcccctgtctgccaagcgtcgccagcgtatcttctgcggcggtggcatcgccaaaaaccagtgccgcttcgaggctgcggcccatggttgccgcggtgagctcaagatttttttgcgcgtactgttttaacgtaatgacggaggcggcgctgagcaaaagccagaccagcgtcatcgaaatcactacgcttatcatactgattcggcgtaacgcgtttttgaaagtggggcgcggggcctgagaaaaatccttattcatgtgatttcttccgggcaagcatcagtacgtccggattgacccgtacaccgctatgcgtcaggacatccagattaacggaaaacctcaccctatcgtcatttatgagcaagcaaaaagcgctgccaaaagagcaatcggtattttgttccgctatgagtaatagaggacgggagccatatttttttgttaatgcagactgctgatccggggtttcactgccgaaatacaaaccgtcgcagctggcctttagggcttcctgtgaatttcgaactatcaccggttgataaggtaaattttccggcgcttcctgagccaaactgcggatatatcgggaggtggaaaaaacgcataacttcggcgggccggataaatttggccagcgcgtataagtcacaatccccgaaactatggcgcgaacgttctcagatgtctcagcggcaaaagcgggaactcccgcgatgagcaaaaagaaaagcaaaaatagacggtaaaactctttcattaacgggtccgtcaaatcgttattgcacgggaaacgcagttcgcagttgcctgagcggagaatagcattattggcaaaaagcgtcattagctgccccggccgctttgagataatccttaccaggaattttagtaaaggaatgagtaaagcgcggcggcaaaaaagagtcttcgccatgtgtacatttatatgaacacttttctggcaatcaggtgccaattattttgctgttgtaaagtaatgtttacgtaatatggattgatatctttactttatatgatatggttacgtcatgcccgctgaggcaacgactatcgcaaacgagctatacaggatcgccatcatgcaaaaagacgcgctgaataacgtacatattaccgatgaacaagttctgattaccccggatcaactgaaagccgaattcccgttaaccgtggagcaggaagcgcagatcgcgcactcccgtcagactatttccaacattattgccggccgcgatccgcgtctgttggtggtctgtggtccttgctcaatccacgatccggaagctgctatcgaatatgctcgtcgatttaaagcccttgccgcagaggtcagcgatagcctctacctggtgatgcgcgtctattttgaaaagccacgtaccaccgttggctggaaagggctgattaacgatccgcacatggatggctcgtttgatgtggaaggcggtctcaagatagcgcgtcgcctgctggttgatttagtcaatatgggcctgccgctggcgacagaagcgctcgatccaaatagcccacagtaccttggcgatctgttcagctggtccgccatcggcgcgcgtaccactgaatcgcagactcaccgtgaaatggcatccggtctgtcgatgccggttggttttaaaaacggtaccgatggcagcctggcgacggcgatcaacgccatgcgcgccgccgcgatgccgcaccgcttcgttggcatcaaccaggccggccaggtttgcctgctgcagacccaggggaatccggatggtcacgtcattctgcgcggcggtaaagcgccaaactacggcccggaagacgttgagaagtgcgaaaaagagatggcgcaggcgggactgaaaccgtcgctgatgatagattgcagtcatggtaattccaataaagactaccgtcgtcagccggcggttgcggaatccgtcgtcgcgcagatcaaagatggtaaccgttccatcattggcctgatgattgagagcaatatccacgaaggcaatcagtcttctgagcagccccgttgcgatatgaagtacggcgtatccgtcaccgatgcctgcatcagttgggaaactaccgatgcactgctgcgcgagctcgatagcgatttgcgcggacatctggcggcacgtctgggttaagaggattgtatggttgctgaactgaccgcattgcgcgatcaaattgatgaagttgataaggcgctgcttgatttgctggcaaagcgcctggagctggtggcggaagttggcgaggttaagagtaaatatggcctgccgatttatgtaccggaacgcgaagccgcgatgctggcttcccgccgggaagaggcggcggcgctcggtgtgccgccggatcttatcgaggatgtcctgcgtcgggtgatgcgcgaatcgtattcaagtgaaaacgacaaaggcttcaaaacgctgcatccgaacctgcgcccggtggttattgttggcggcggtgggcagatggggcgtcttttcgagaagatgctgacgctgtcaggctatcaggtgcggattctggaaaaagaagactggccgcgggcaacagagattgtcgccgatgccgggatggttatcgtcagcgttccgatccataccacagcagagacgatttcgcgtctgccgccgctgccggcggattgcattctggtcgatctggcttccatcaaagccgagccgctgcaggcgatgctggcggcgcataacggcccggtattgggattgcacccgatgtttggtccggatagcggcagcctggcgaaacaggtggtggtttactgcgacgggcgtcagccggaagcgtaccagtggttccttgaacagattcaggtctggggcgcgcggctgcaccgcatcagcgctgttgagcacgatcagaacatggcgtttattcaggcgttgcgtcactttgccactttcgcctatggcctgcatctggctgaagagaacgttcgtcttgagcaactattggcgctctcttcgccgatttatcgactggagctggcgatggtggggcgtctgtttgcccaggatccgcagctgtatgccgacatcattatgtcgtcagaaaataatctggcgttaattaagcgctactaccagcggttcggcgaagcgattggcctgctggagcagggcgataagcaggcgtttatcgacagcttccgtaaagtcgaacactggtttggcgattacgcccagcgcttccagagcgaaagccgcacgctgctgcgccaggcgaatgataatcgacagtaagcccgctaaacgtgtatacaataaagccagaggggtaacccgctggcttttttatagggatgaaaagatggcacaaccgcaaccgctgtttgattacgtcgggcatctgccggaatgcccaacctggagcgatgccgagcaggcactgtactgggcggatattctggagtgcgaaattcaccgctacgatacacgcagtaaagagcaccaggttctgcaatttcccgaagaagtgggctgttttgcgctacgcgagaagggcggttttatcgtcgccttacgtagcggtatctggctttgtgatgcccgcggtctgctgcaacgcaaaatctgtgataacccaagtaacccggatctcgcgcgttttaacgacggcggcaccgaccgggatggccgtttttacgcaggtaccttctgggggccgggggattacaatggcgcgctgctggtgcgtattgataacgacctgacgccaaaggtggtgcagtgcgatattcatggtgctaatggtctggcgtttagcgacgataagcgctggatgtatacctccgatacgccgaacgcggtgatttaccgcacgccgctggatgagcagggcgagccgggcaaacgggaagtacttcgtcgtttccatcctggagaggggatccctgacggtgcggcggttgatgaagaaggctgttactggagtgcgatgtttgacggctggcggattgcccgcttttcgccgaacggagaacaactggaagagtatcgcgtgccggtgcgttgccccacgatggtgtgtttcggcggcgcggatatgaaaacgctctatatcactaccacccgggaaaatatggacgccgacgaagtggcgcaatatccgctttccggcgccatcttcaccctgccggttgcggtggcagggatgaagaaacggcaatttattgaacgttaagccgggtcgaccggcacgacgttttcgctcgggtaacagcccagtactttcatcgaacgggtaatttcggccagctcttttaaagccttacgtaagggaagggattccaggttggcctgaatatccagataaaacatctcttcccacgggttaccgtggatggggcgtgattccagcttgctcatgatcaggttgtggttgcgcagcaccagtagcgcttcaaccagcgcgccagcctgttggccggtggcgattaacaacgtcgttttcgccggcacctgatcggatacgttcaccgctttacgcgccagtaccaggaaacgagtgatgttttgcgtctggttagcctggcagtgctccagcacctgcagcccgtacagcgcgccgccggcctcgctacccagcgcggcaacggtgggggattttgcctgcgcgactttttccatcgccgctgaggtgctctcggtgtactcgattttccagtgcggatagcggcttaaatattggctgcactgctggaacggctgcggatggctataaacggtctcgatcttatcagcgtccgttgaggatgaaacgagcacacagtgatcgattggtagcgtcagttcgccgacgatcgacagactggtatgctgcagcagatcgtacacatcgttgatcccgccggagctggtgttttcaatcggcacgacggcgtaatcggcctgaccggtttcgacctgctcaaagatatcggcgaatttcgcgcagccgctttcgataaattgctcaaaatgacgcgcggcgtactggcgcgcggcaagatgtgaatacgagcctttaggcccaaggaaggcgatacgcgcggagcgggggttaatcttattaagatgctgctgcagtagcgcctgctgggtaagaacggagtcttcaataatcagctggaacaggcgggtaatgtagtgggcgtccagatgatgctttttgccaagcgtcattaaacgctccagcaggtcgcgttcgcggtcgatatcgcgtactggacggtgcgattccagcttcgctttcccgacttctaccgccaggccgcggcgttcggccagcagtgcgagcagtttttcatccagggcgcttattttgtcgcgcagggccagtaatgggttttcctcggtcataattgtgttgcctttcttgttatcaataaaaaaggcctcccgcgtgggaggccttgttattcgtcttggcattctttcttatacgacgaaccgcctcccagtcaggggaaggtaaaaaagaatgcgaagaagaacgggagtcgtttcacgatgaattccttaggttagtgtggattacagtacctgtactgttttcatcctgtcaattaaaaaacgaaaaacgcgcccgaaggcgcgtggcatgacacaacttaagttaaggattactcttcttcttccacaaagcctgcctctttcaccgatgtggcggcgcggcgggcttcccctttgtgttgcactttattcagctgccgttccagcttgttgatcaattcgttaatggcggcgtacatgtcttcatgacgcgcgctggcaaccagatggccgttcggcgtattgatggttgcgtcagcaataaaaccctgcggctccttagagagaatgatgtgcgggttgattaaatgagtttgccacttatccagtttggcgagacggtctgcgacatgctggcggattgccggagtaatttccatttgtttactggtaatgttcattgtcataaattttacctcttgtctttcccgtcttggtgaacccagcatacctcgcctaatgtcaaaatgtgtgatctaaatcacatttaaatgtcactttttgtcaacgaattcattttgtgagacaggacaggaacggatgagattttacttgtcgaaatgaagaaagggggccatatttgatgagttaactcggcgctaaaccgcttcagcgctggtgttcatcgaataaaaaaacggcagcccaggggctgccgttttgctttcagttatcaccctcaggtgtttttgccgttggcggcgatgattttggcgactttgtcagcttgcgcgttcatttgcatctgacgataggcgttttccatcttcggcagcgcatcgcgagtggcctgcgtatccgggtagttacgcagcataccgtcaacgcggttcacgacggcaacccaggcgccgcgatcggtgtaataatccaccaccgacagctcatacttcgccagacggtctttcaggaacaccagacgtttgtaggcgtctgtagcgtactggctgttcggataaccgcgaaccagcttcgagaaatcattgaatgcgtcgcgagcgtgctgcgggtcgcggtcggaacgatcgacgccgaagaagccctgcagagcgctgtcatcaagggccatgttagtcaggccacgcatatagatgacatagtcaatgtttggatgcgtaggattcagacgagcgaaacgatcgattgcggcctgggccagcggcaaatcggcatttttgtaatacgcataaatcaggtccaactgtacctgttgggagtaaggaccaaatggatagcgattatccaacgcttccagttgcgttattgcctgtttccagttaccgtcctgcaacttttgctgggcggtcgcgtaaatttcattcggcggattatcaggcacctcctcctttgagccagagcaacccaccaaagccaggctcagtgtggctgctgccaccaggtatttcatgcgcgtcatgacgttttgacttcctcaaaatgtttatgcgggagaatctctgttcctgctcccgattaagaccagctacaatagcacactatattaaacggcaaagccgtaaaacccaacgttaaacgaagaagctgtatatggcacaacgagtacaactcaccgcaacggtgtccgaaaaccaactcggtcaacgcttagatcaggctttggccgaattgttcccggattattcacgttcgcggataaaagaatggatccttgaccagcgcgtgctggtaaacggcaacgtcatcgacaagccgaaagaaaaagtttttggcggcgaagccgtctctatcgatgttgagatcgaggaagacgtgcgttttgaaccgcaggatattccgctcaatatcgtctatgaagatgacgacatcctggtcatcaacaaaccacgtgatttggttgtgcaccctggtgcgggcaaccctgacggtactgtgctgaatgcgctgctgcattactatccgcccattgccgatgtccctcgcgcgggtattgttcaccgtctggataaagataccaccggcctgatggtcgtggcgaagactattccggcgcaaacgcgtctggtcgagtcactgcagctgcgcgaaattacccgcgagtatgaggcggtggctatcggccacatgaccgctggcggtacggttgaagaaccaatcagccgtcacccgaccaagcgcacgcatatggcggttcacccgatggggaaaccggcggtgacccattaccgcattatggaacatttccgtatccacacccgtttgcgcctgcgcctggaaaccggccgtacccaccaaatccgcgtccatatggcgcatattacccatccgctggtgggcgatcaggtttatggcggccgcccgcgtccgccgaaaggggcatcggacgagttcatcagcgcgctgcgcaaattcgatcgccaggcattacacgcgaccatgctgcgtctgtatcacccaattaccggtattgagatggaatggcacgcgccgatcccgcaggatatggtggaactgatcgacgccatgcgcgccgattttgaagcccataaggacgatattgactggttatgacaaagctgattgttccgcagtggcctatgccgaaaggcgtggcggcctgtagttctacccgtgtgggcggcgtgagcctgcctccgtatgactcgttgaaccttggcgcccattgcggcgacgatctcctgcatgtcgaagaaaaccgccggcggatgtttgccgctggcggattaccctcttatccggtgtggctggagcaggtgcatggcaccacggtactaaaattggatggcgggccgtacgtgtcaaaacgcgccgatgcgtcatactgtaatacgccgggtaccgtttgtgcggtgatgaccgcagactgcctgccggtgctgttctgtaaccgcgccggaaccgaggtggcggcggcgcatgccggatggcgcggcttatgtgaaggcgttctggaagaaacagtcgcctgctttaatgataaaccggaaaatatcctggcctggcttggtccggcaattggccctgaggcgtttgaagtcggtgcggaagtgcgcgaggctttcatcgccaaagatgcccaggcgcagagcgccttccgtcctgccggtgaaaaatattttgctaatatttatcaattggctcgtcagcgcctggctaacgtcggcgtggagcagattttcggcggcgatcgttgcactctaagtgaaaaagatgattttttctcttatcgtcgcgacaagaccacaggtcgtatggcaagtttcatttggctgatataacctagagaatcaagacgatccagaaggcaaacttatttttcacatagttcaggtctttaaccttgaataattgagggatgacctcatttaatctccagtagcaaatttgacctgtttatgggaggagttatgcgtctggatcgtcttactaataaattccagcttgctcttgccgatgcccagtcgctagcactcgggcacgacaaccaattcatcgaaccacttcatctaatgagcgccttgctgaatcaggaagggggatcggtgtatcctttactaacctcggcgggtgttaacgccgtggcgttacgcagccaaatcgaacaggcgctgagccgtttaccgcaggtagaaggtaccggcggcgacgtccagccgtctcaggatttggtgcgtattctcaatctttgcgacaagctggcgcaaaagagaaaggataactttatttcgtcagaactgttcgttctggcggcgcttgaatcacgcggtacgctgaccgacctgctgaaatctgccggagcaacaaccgccaatgtgactcaggcgattgaacaaatgcgcggaggtgaaagcgtgaacgatcagggtgccgaagaccaacgtcaggcattgaaaaaatttaccgtcgatctgaccgagcgtgccgaacaaggcaaactggacccggtgatcggccgtgatgaagagatccgtcgtaccatccaggtacttcagcgccgtactaaaaacaacccggtgctgattggtgaacccggggtgggtaaaacggcaatcgtcgaaggactggcgcagcgtatcgtcaacggcgaagtaccagaagggctgaaaggccgtcgggtattggcgctggatatgggcgcgctggtggccggggcgaaatatcgcggtgaattcgaagagcgtctgaaaggcgtgctgaacgatctggcgaaacaggaaggcaacgttatcctgtttatcgatgagctgcacaccatggtcggcgcgggtaaagccgacggcgcgatggatgccggcaacatgctgaaaccggccctggcgcgcggtgaactgcactgcgtcggcgccaccacccttgacgaataccgccagtacattgaaaaagacgccgcgctggaacgtcgtttccagaaagtgttcgttgccgagccgacggtagaagataccatcgccatactgcgcggtctgaaagaacgttatgaactgcaccaccacgtgcagatcactgacccggccatcgtggcagcggcgaccctgtcgcatcgctatattgccgaccgtcagttgccggataaagccatcgaccttatcgatgaagcagcatccagcatccgtatgcagatcgactcgaagccggaagagctggaccgtctcgatcgccgtatcatccagttgaagttggaacagcaggcgctgaagaaagaggcggatgaagcgagcctgaagcgtctcgatatgcttaatgaagagctggcggacaaagaaagccagtattcggtgctggaagaagagtggaaagcggaaaaagcatcgctctccggtacgcagactattaaagctgagctggaacaagccaaaattgctatcgaacaagcacgacgtcttggcgacctcgcgcggatgtccgaactgcaatacggtaaaattccggagctggaaaaacagctggcggcagccacccagtctgaaggcaaaacgatgcgcctgttacgtaacaaagtaaccgatgccgagattgccgaagtgctggcgcgctggaccggtattccggtggcgcgcatgatggaaagcgagcgcgaaaaactgttgcgtatggaacaggatctgcatcaccgcgttattggccaggatgaagcggttgaagcggtatccaacgccattcgccgtagccgcgccgggctgtctgacccgaaccggcctattggttcgttcctgttcctcggcccgaccggggtgggtaaaaccgagctttgcaaaacgctggctaacttcatgttcgacagcgacgacgcgatggtgcgtatcgatatgtccgaatttatggagaaacactccgtctcgcgtctggtcggtgcgcctccgggatacgtgggttatgaagagggcggctatctgaccgaagcggtccgtcgtcgtccttattccgtcatcctgttggatgaagtggaaaaagcgcatccggatgtatttaacattctgctgcaggtgcttgacgatggtcgcctgaccgacgggcaggggagaacggtcgacttccgtaatacggttgtcatcatgacctcaaacctcggttccgatctgatccaggaacgtttcggcgagctggactacggtcatatgaaggatctggtgcttggcgtggttagccagcgcttccgtccggagtttatcaaccgtatcgatgaagtggtggtcttccatccgttgggtgaaaaacatattgcttctattgcgcagatccaactgcagcgtttgtataaacgtctggaagagcgcggctatgaagtgcatatgtccgatgaggcgttgaagctgctgagcgaaaatggctacgacccggtatacggcgcgcgtccattgaaacgtgccatccagcaacagatagagaacccgttagcgcagcaaatcctgtctggcgagctggttccggggaaaaccgtcgagctggtggtaaaagacgaccgcatcgtagcagtgcagtaagtcacaaaacgacaaaaacgggccctttgggctcgtttttgtttaaaaaccaggcaagaattaaagttcaaacgttaatttggttgaaaagtgagcgcttgaattgtttttttgaatttatgcttgtcacttcagaattactccctataatgcgcctccactgacacggaacaacggcaaacaagccgccgggtcagcaggttttcagcagcgaaatgtgacgctgaaaaccgacagagaaaagtgaaataagcgcttgactctgaatgaggaaaacgtattatacgggacctcgcaacggtgagctgaaagccgcgttgcaactgctctttaacaatttatcagacaatctgtgtgggcactcaaagtgacatggattcttaacgtcctcggacgaaaaatgaataccaagtctctgagtgaacatacgtaattcattacgaagtttaattcacgagcatcaaacttaaattgaagagtttgatcatggctcagattgaacgctggcggcaggcctaacacatgcaagtcgagcggtagcacagagagcttgctctcgggtgacgagcggcggacgggtgagtaatgtctgggaaactgcctgatggagggggataactactggaaacggtagctaataccgcataacgtcgcaagaccaaagtgggggaccttcgggcctcatgccatcagatgtgcccagatgggattagctagtaggtggggtaatggctcacctaggcgacgatccctagctggtctgagaggatgaccagccacactggaactgagacacggtccagactcctacgggaggcagcagtggggaatattgcacaatgggcgcaagcctgatgcagccatgccgcgtgtatgaagaaggccttcgggttgtaaagtactttcagcgaggaggaaggcgttaaggttaataaccttggcgattgacgttactcgcagaagaagcaccggctaactccgtgccagcagccgcggtaatacggagggtgcaagcgttaatcggaattactgggcgtaaagcgcacgcaggcggtctgtcaagtcggatgtgaaatccccgggctcaacctgggaactgcattcgaaactggcaggctagagtcttgtagaggggggtagaattccaggtgtagcggtgaaatgcgtagagatctggaggaataccggtggcgaaggcggccccctggacaaagactgacgctcaggtgcgaaagcgtggggagcaaacaggattagataccctggtagtccacgccgtaaacgatgtcgacttggaggttgtgcccttgaggcgtggcttccggagctaacgcgttaagtcgaccgcctggggagtacggccgcaaggttaaaactcaaatgaattgacgggggcccgcacaagcggtggagcatgtggtttaattcgatgcaacgcgaagaaccttacctactcttgacatccagagaacttagcagagatgctttggtgccttcgggaactctgagacaggtgctgcatggctgtcgtcagctcgtgttgtgaaatgttgggttaagtcccgcaacgagcgcaacccttatcctttgttgccagcggtccggccgggaactcaaaggagactgccagtgataaactggaggaaggtggggatgacgtcaagtcatcatggcccttacgagtagggctacacacgtgctacaatggcatatacaaagagaagcgacctcgcgagagcaagcggacctcataaagtatgtcgtagtccggattggagtctgcaactcgactccatgaagtcggaatcgctagtaatcgtagatcagaatgctacggtgaatacgttcccgggccttgtacacaccgcccgtcacaccatgggagtgggttgcaaaagaagtaggtagcttaaccttcgggagggcgcttaccactttgtgattcatgactggggtgaagtcgtaacaaggtaaccgtaggggaacctgcggttggatcacctccttaccttaaagaacctgcctttgtagtgctcacacagattgtctgatgaaagtagagaagcaaggcgtcttgcgattgagacttcagtgtccccttcgtctagaggcccaggacaccgccctttcacggcggtaacaggggttcgaatcccctaggggacgccacttgctggttcgtgagtgaaagacgcgtgccgatatatctcaaaactcatcttcgggtgacgtttgagatatttgctctttaaaaatctggatcaagctgaaaattgaaacgacacacagttaatgtgtgttcgagtctctcaaattttcgcaacacgtgggtgttttacgaaacatcttcgggttgtgaggttaagcgactaagcgtacacggtggatgccctggcagtcagaggcgatgaaggacgtgctaatctgcgaaaagcgtcggtaaggtgatatgaaccgttacagccggcgatgtccgaatggggaaacccagtgcaattcgttgcactatcgttaactgaatacataggttaacgaggcgaaccgggggaactgaaacatctaagtaccccgaggaaaagaaatcaaccgagattcccccagtagcggcgagcgaacggggagcagcccagagtctgaatcagcttgtgtgttagtggaacggtctggaaagtccgacggtacagggtgatagtcccgtacaccaaaatgcacaggctgtgaactcgaagagtagggcgggacacgtggtatcctgtctgaatatggggggaccatcctccaaggctaaatactcctgactgaccgatagtgaaccagtaccgtgagggaaaggcgaaaagaaccccggcgaggggagtgaaaaagaacctgaaaccgtgtacgtacaagcagtgggagcaccttcgggtgtgactgcgtaccttttgtataatgggtcagcgacttatattctgtagcaaggttaaccgtataggggagccgcagggaaaccgagtcttaactgggcgttaagttgcagggtatagacccgaaacccggtgatctagccatgggcaggttgaaggttgggtaacactaactggaggaccgaaccgactaatgttgaaaaattagcggatgacttgtggctgggggtgaaaggccaatcaaaccgggagatagctggttctccccgaaagctatttaggtagcgcctcgtgaattcatcttcgggggtagagcactgtttcggctagggggtcatcccgacttaccaacccgatgcaaactacgaataccgaagaatgttatcacgggagacacacggcgggtgctaacgtccgtcgtgaagagggaaacaacccagaccgccagctaaggtcccaaagtcacagttaagtgggaaacgatgtgggaaggcacagacagccaggatgttggcttagaagcagccatcatttaaagaaagcgtaatagctcactggtcgagtcggcctgcgcggaagatgtaacggggctaaactgtgcaccgaagctgcggcagcgacactatgtgttgttgggtaggggagcgttctgtaagcctgcgaaggtggcctgtgagggttgctggaggtatcagaagtgcgaatgctgacataagtaacgataatgcgggtgaaaagcccgcacgccggaagaccaagggttcctgtccaacgttaatcggggcagggtgagtcgacccctaaggcgaggccgaaaggcgtagtcgatgggaaacaggttaatattcctgtacttggtgttactgcgaaggggggacggagaaggctatgttagccgggcgacggttgtcccggtttaagcatgtaggcggaggttccaggtaaatccggtaccttttaacgctgaggtgtgatgacgaggcactacggtgctgaagtaacaaatgccctgcttccaggaaaagcctctaagcatcaggtaacattgaatcgtaccccaaaccgacacaggtggtcaggtagagaataccaaggcgcttgagagaactcgggtgaaggaactaggcaaaatggtgccgtaacttcgggagaaggcacgctgatatgtaggtgaagtccctgcgggtggagctgaaatcagtcgaagataccagctggctgcaactgtttattaaaaacacagcactgtgcaaacacgaaagtggacgtatacggtgtgacgcctgcccggtgccggaaggttaattgatggggttatccgtaaggagaagctcttgatcgaagccccggtaaacggcggccgtaactataacggtcctaaggtagcgaaattccttgtcgggtaagttccgacctgcacgaatggcgtaatgatggccaggctgtctccacccgagactcagtgaaattgaactcgctgtgaagatgcagtgtacccgcggcaagacggaaagaccccgtgaacctttactatagcttgacactgaacattgagccttgatgtgtaggataggtgggaggctttgaagcgtggacgccagtctgcgtggagccaaccttgaaataccaccctttaatgtttgatgttctaacgttggcccctaatcggggttgcggacagtgtctggtgggtagtttgactggggcggtctcctcccaaagagtaacggaggagcacgaaggttagctaatcctggtcggacatcaggaggttagtgcaatggcataagctagcttgactgcgagcgtgacggcgcgagcaggtgcgaaagcaggtcatagtgatccggtggttctgaatggaagggccatcgctcaacggataaaaggtactccggggataacaggctgataccgcccaagagttcatatcgacggcggtgtttggcacctcgatgtcggctcatcacatcctggggctgaagtaggtcccaagggtatggctgttcgccatttaaagtggtacgcgagctgggtttagaacgtcgtgagacagttcggtccctatctgccgtgggcgctggagaattgaggggggctgctcctagtacgagaggaccggagtggacgcatcactggtgttcgggttgtcatgccaatggcattgcccggtagctaaatgcggaagagataagtgctgaaagcatctaagcacgaaacttgccccgagatgagttctccctgagactttaagtctcctgaaggaacgttaaagacgatgacgttgataggtcgggtgtgtaagcgtagcgatacgttgagctaaccgatactaatgaaccgtgaggcttaaccttacaacgccgaaggtgttttggcgatttgagatgattttcagcctgatacagattactcgatgcgtcctgaggacgtgttgaaaacagaatttgcctggcggcgatagcgcggtggtcccacctgaccccatgccgaactcagaagtgaaacgccgtagcgccgatggtagtgtggggtctccccatgtgagagtagggaactgccaggcatcaaataaagcgaaaggctcagtcgaaagactgggccttttgttttatctgttgtttgtcggtgagcgctctccggagtaggacaaatccgccgggagcggatttgaacgttgcgcagcaacggcccggagggtggcgggcaggacgcccgccataaactgccaggcatcaaataaaacgaaaggctcagtcggaagaccgggccttttgttttggtgttttgcggccaggcgcgccgccatcttccccggtggcgctacgcttaccggggctaccgatcgttccccgcctgcgggaaaatcttgctacaccatctcatcaccttcattcaaagccatataaaaccccgtcgttgtaaccacttcgccataattcactttttcgctgctcatgtgctgacgttaatcgcgaaaaccggtgttacgaaaaaaaatgtgaatacaatcacatataaataaataacaattatataacatttggttcactaattaatttgtctgagtgacgtgtcacgcccgatgagacagattacggtctttgctggagcaaaattataatgacagaaagtagcattaacgagcagggttccctggagcagggcgatacccggcgccgtgtatgggcaattgtgggggcatcttcagggaacctggtggaatggtttgatttttatgtctactcattttgctcactctattttgcgcacatctttttcccttcaggaaataccactactcaattgttacaaaccgccggagtttttgccgctggcttcctgatgcgccccatcggcggctggctgtttggccgcattgctgaccgtcgcggacgtaaagcctcaatgcttatttcggtatgcatgatgtgcttcggctcgctggtaattgcttgtctaccgggatacgccactatcggcacctgggcaccggctttgctcctgctggcacgtctgttccagggcctgtccgttggcggggaatatggcaccagcgcgacctacatgagtgaagtggcagtagaaggaaagaaaggattctacgcctccttccagtacgttacgttaattggcggtcaactgctggcggtactggtcgttgtcgcactacagcaaatcctcagtgatgaagatttgcatgcctggggatggcgtattccttttgcgctgggcgcagtactggccatcgtcgcgctgtggctgcgtcgtcagttggatgaaacctcgaagcaggaaacccgtgcgctgaaagaggccggttcctttaaaggtttgtggcgtaatcgccgggcttttgtcatggtgctgggctttactgccgccggttcgctgactttttacaccttcaccacgtatatgcaaaaatatctggtgaataccgccggcatgacggccagcaccgccagcatgattatgacggcggcgcttttcgtgtatatgctggtacaaccgctatttggcgccttctcggataaggtggggcgccgtacttcaatgctgtgtttcggcgtgctggcgacgctgtttaccgtgccaatcttgagtgcgctgcagaatgttagctcgccgtatgccgcatttgcgctggtgatttgcgcgttgctgatcgtcagcttctacacctccatcagcgggatcctgaaggcggaaatgtttccggcacaggttcgcgcgctgggcgtgggcctgtcctatgcggtagcaaacgcgttgttcggcggttcggctgaatacgtcgcgctgtcgcttaaatctataggaatggagaatgccttctactggtacgtgacggtaatggcggcgattgccttcctggtctccctgatgctgcatggtaaagggaaggggttgcgtttgtaaccttattgatgcgccagttgccacaccgtatagccggtggtggcgccggcgacatcccaggcgaaatccttccagctccagccgctccctgccgggcggctgtcccataactcttttgatgcccccagactaacggaaaacatcagaccgatggcggcgctgcgatcgcggctgtatccctgatgctgcgcatattcattgccggcggcggagagcattgccgacgcgagaaagtgttgggccttgtcctgaccgctccaggcatcattggccatatggctgcagccgctgagtagtaaaggggcaataatgatgaagtagcgcataattcttcctgaaaaaaagccccggattacggggcgttgatcttagagaatgcggctgatgaggcggtcgatgcggatgcgccgcagacggcggatgagctttttcaccttcaccggatagtcggcgatgctttgtagatcgcgatagtgcttcactaccgtcgtatgtgtacggatgagctgaagctccttttcccgcatttcgcgcagttgatgcttaggatcgtggatcagtacggcattttctaaatccagccgccaggcgcgcggattgaggttgttgccggtcagcagcatccactcgttatcaacccacatgcctttcaggtggtagctgttatcgtcatctttccataaacgtacgatgagctgatcggtattcacataatactgcagacggctcaggaagcgacgcaggttaatttcgtacaaataaggcaatgcgccgatgattttaaacggctgatcttccgggatatagaagtcgttcgcggtcttgtcgccgacgatgatttccactttttttccgctgcgtagcagagaaataatatttctgaccagtacggcgggcaggttgaaatacggggtgcagatggtcagcttatgttccgcacacggcatcaggtggaagatagtcttgttgagcaggctcgatttaccgagcccgaccagcggtgtgactgacagttgatcttcatcggcattgccggtgaagtgatagccgctttcgcgcagatcctggcgatactggcgaatatcatttttgatttccgggctttttggtcgatccgggcgatcgagtcgattcacgccgcgaccctgtaccagattctgctcgacccagtcgaacatcacgtcggccatcttgccgttgcggatgcactgatagcgatcgtagcgatatttatcatgctgatgcaggtacacatcgttcaggctggcgccgctataaataacgctgtcatcgatgatgaagcctttaaaatggagcacgccgagcgcttcccgggtattgaccgggacgccatacaccgggatatcaatccctgggttttcctgggccatgcgacagtaccaatcggcattggtattggaggctgccgcgccgatacggccacgctgggcgcgatgccagtcaaccagcacgcgcacatccagttctggacgctggcgtttagcgtcatacagggcttgcagtattccttttccgccatcatcttgctcaagatagagcgcaataatgcaaatacgctgggtggcgtgggctatctttgccagtagcgcctggcggaaatcagccggcgcgtaaaagaactcgatatcatcaactgactgagagagcttagggagttgggcaaggtgttgttgatgtttattacgcttaaattttgacaacatcacagtgcgtttcttctctgtttattgaagggtcttctgtaccatgcagatgacgtaagcgggcaataataccattactacccgcgaatgtggtcattaattgctgtcgcttgtcaccgaatgtaacgtattcagcgcaagagacaggctcactattccgtcttctaactggatatccactgcaaaaccaagctttctggcaaggcctatcatgccgcggttatttggcatggtgatgccatttaagcgctgtaatccatggctctgcgtataggcgatcagtttttcaagaagctgtcgaccaaggcctaaacctttcaggtcagaacgcaccagcacggcaaactcggcatcaatattatcaggatcggaaattgctctggtcacgccgaggatctcgcttccttgctccgtggcgcgaaccgcaacaaaggccatttcacgatcgtagtcgatctgcgtcatattggctaagtcgtcatgggtgaattcgttgatctcgctgaagtagcggtaatagagatcttctttggtgacccgctcaataaaggccaataatagtggttcatcctcaggcaggatcggccggaacaggcagcgctcgccgtttttcattgccacccattcctcaagttgctgcggatagggtctgaccgccagtcggctttcgctgtcgccgctaaatggcgccaggctgagagtaacgtcgagggcggtaaactcgttgccggaagcaagcaaggggtgaatatccagccgctggatctcggggcaatcgacaatcaggttagagacctgcaccagcagttggctgaggccgggaatatccaacgggcgtagcgcgctgcgtccgcggatctttttactcttgatggcctggatcaccagataacgcgccaggttcatattcagcggcggcagggcgaccgcggcctgattttccgcacgccattcgacgccgccctcgccaagcataatcagcgggccgaaaagcgggtcatgctcgacgacgacccggagctcctgcgccccggcacggttggccatactctgtaccaacaggccatgaatgcgcgcctgcggccaggccatttttacccggtcgataatcgcgtccgccgcctgctggacttcagctggggtacgtaaatagagcatgacgccctgaacttccgatttatgcggaatatccggcgaacgtagcttcaacgccaccgggtagccaatctgctcggcgatatgtaccgcttcggcgctgtcggcggcaatccaggtgggaagagtatggatgccgtaggcgcgcagcagcgggctgacctcatgggtgtccagcgaggtcgcgccttcgctcagcgcgcgctgcaacagcgtgtgggcctctgcggtattggcggtcaaggtatcggacaataccggcgtttcccttagctgtttctggtttcgccggtattcgaccatatgcataaaggcggtaatagtgccttccggtgtgcgataggttgggataccggcctcgctaaacaaccgtcgcgcctcctgggaagagtactccccgcaccagttcgtcagcaccgtgacgtatttcccgcgtggatgacgcttaagggcatcaatcaacgccagtgcgctttcggtgcccggcgccgcggcgctgggggagtggatcaccagcagcgcatcataatcctggctgtccagcaacacattcagcgccttgagatagtgctcgctgctggcgtcatcgcgcagatccagaggattagcgacctcaacgcctgtcggtaacgcctgactgagctggtcgcaggtggcttcactgaggttggcgagtttgccgttacgcagccacagttcgtccaacgccagcgccgccggcgccgcgccattactgataatcatcagcttttcgccgcgcaaagggcgcatatggctcagggtttcaacggcggaaaagagctcgtgggtgtcctgcacgcgcagcagccccgcccgctgaatagcggcatcccaggcgggatccatccctgagttgacatgcagtaatttctgcgccgccgggctgcggccgcttttgatgaccagaatgggtttattacgcgatgcgctacgggcagcggagacaaaacgccgggcatcgctgagatgctccagatagagcaaaatagcgctggtcttgctatcgcgggcgagaaaatcgagcaggtcgtcgacgtcgatatcaagactatcgccaagcgcaataaagtacgagaagcccatttcacgctgctgcgcccagtccagaatggtgttagagacggcggcggattgcgagataaacgccagcttgccgcgctggatagggaccggcgaaaagctggcgttcaggccctgccacggcgccagcagtcccaggctgttgggaccgagcagacgcatttgataacgggcggcgcactcgagcagcgccgggtactggtctggctgtgaagagaggataatgcaggttttacaccctttccgccctaaggcctcgagcaactcgagattgcgacgggcattagtacagagcaccgccagatccggggtaaacggcaggctgtcgatagtcggccacgccagtacgccaagcaccgctttccaggcgggcgtcaccggcaggaccgggccattaaaaccgccggccaacaaattgcgcatcattaaatagccagcgcgctgcggtttcatcgatgcgccaatgacggcgatcgattttggccgcagcagtgcttccaggcctcgttggctcattccggtctcctttgatcccctgtgaccgaatgattttaaacgctttcagcctgttgtgctgtgatactgcccttatgctgcgtttttcccgccagatagcggcttctgaacaggctaaagtgatcgccaaggcgcggccgccgcctgcgcgtcgccggctaagtccagcagggcgatggcgacttccgccgtacagtactgaccgtcggcatgggcttcgcgcaggtgataggcggagatgcgcgacaggtcgacagagattaccggcagcgcatcgagatacgggcttttgcgaaacattttccgcgcttccgtccaggtgccgtcgagcataataaacagcggcggcttaccctccggcggggcgctcagtacctggcgttccgctccggcataagaggccggaaagacgaccatgggctgataatcggggttggcgaccagatcgagcagcgcctgcggcggctcggtacgcgaccactgaaacgcttcggtgttgggcagaatatcggcgataaggcgcccggtattgctgggcttcatcggctcggtgtcgaacattaccaggcaaaagcggctgtcggcctgcgccggcgccagcgttgcgcacagacactgttttagggggagcaggcagcgctggcagcggcggatgcggttgccgcgagcaagaaaaggccgggttgcgcgcgcgaggcgttcggcgcgtagccgaaggacagcgttatcaatcatgggagtcgctaatgaaaaacgctattgtcgcagaggagaaaacggggcacaagcggtgcccctgtggggttactgctggttggcttcgttcagccagctatcgaacggcgctttggggacggcgccattcagcatgtcgaccatttcaccatttttaaacatcataatggttggaatgctacggatgcggaagcgagcgctcagttcgcgttcggcttcagtgttcactttcacaaaacgcatttcgccgctgcgctcttcagccacatcttcaaagatcggcgcaaagctacggcatgggccgcaccacggggcccagaaatcaataacgactggcagatcgtcctttaatagtttatccagcgttgccccggtcgcgttgatgacatcgccgtcaaagagatcgtggccgcagcgtccgcacttggcgccatcggcgctacggtcttcggggatgcggttaagagcctgacaactggcacaaacggtattcataactaacctctggttatggggttgcagcgcggcacgtggccgatttgtttctgtaatgttacatattatcgatgaggcgcgaataaaggacaatgtcttttgttcgatggttacaatagaccaaggcttttaaatgaaataatggctaagtgaagatacatcgggtaattttcgcgcttcgcgcacggcaggtggagaaaatagatgagcgaccgaactgaaaaataaaagcggcaaggtcaaagtgatgtatgtccgcagtgatgatgattctgacaaacgtacccataacccgcgtaccgggaaagggggagggcgtccaggaaagtcacgtgttgacggccgcagccgccctgcgcgcgatgaacgtaacagccgcggcgacgatcgcaaacgcgacgatcgcaagcgcaatgattttaaccgtgacgatgcgtccccgtggcgcaccgtttcccgcgctccgggtgatgagacgccggtaaaagaagatcacggcggtatcagcggtaagagctttatcgatccggaagtgctgcgtcgtcagcgcgcggaagagacccgcgtctacggcgagaacgcctgtcaggcgctgttccagagccgtccggaagccatcgtacgcgcctggtttatccagagcgtcactccgcgctttaaagaggcgctgcgctggatggcggccaaccgtaaggcctaccacgtagtggacgaagccgaactggcgaaggcgtctggtaccgaacaccacggcggcgtctgcttcctgatcaaaaaacgtcatggtacttccgtggcccagtgggtggcgaaagcagaagccgaagattgcgtactggcgctggaagatgttggcaacccgcacaacctcggcgcgattatgcgtagctgcgcgcactttggcgtgaaaggcgtggtagtgcaggatgccggcgtgctggagtctggcgcggcgatccgtactgcagaaggcggcgcggaacatgttgagccgatcaccggcgacagctttatcgataccctgacgcagttccgtcaggctggttacgccatcgtctcgacctccagccataacggtacgccgctgtttaaggccgagctgccgaagaaaatggtgctggtattaggccaggagcgcgacggtctgtccgatgcggcgatctccagctctgacctcaacgtcgccatcgatggcaccggcaacgtcgaaagccttaacgtctccgtggcgaccggcgtgctgctggcggaatggtggcgtcagaataaggcctgatatcggtctctgaatgcaaaaagccagctgatgctggcttttttattgccgtcgcttactcgctttcagcgggcagcaccggcatccagtcaatgggcgcctcgccgcgttcggccagccattggttggtttgcacaaagtggttgcagccgaagaaaccgcggtgcgccgacagcggcgacgggtgcggcgctttcaggacgcaatggcgctggcgatcgataatggcgccttttttctgcgcgtgcgccccccacagcagaaataccactccttcacaatgctggttaatcagcgctatcactttatcggtaaaggtttcccagccgagactggcgtgtgaatgcgcctgaccggcgcgcaccgttaacacggtattaagcaggagcacgccctggcgcgcccagctttccagataaccatgcgccgggcgctgaaagccggagatggtgccttccagctctttatacatgttcagcagcgacggcggtatctgcactcccggtaaaacagaaaaggccagaccgtgcgcctgtcccgggccgtgatagggatcctgacctaagatgaccactttgacctcgcccagttcggtatagcgaaaggcgttaaagacatctttctgcggcggatagatagtcatgccggactggcgctcttcggcgacggtcttgagggtattgagaaaatagggctgctgcttctcttccgccagcacgtcgtgccaggttaatggggtggtcatctcgctctcctgcaaagtgtcatgcccatagcttaactgcttctttctgcataacaaaatcgcgacgtcattcctgactggttgcgcataaaaaaaattgaaaatttacaaatttttttatggcacctactggcgtaacttgatgtaaaacaatactatcctcatatacccactttgagtgagtggtttttgttgatttaagtcaatgaatgccgggtgtgtggctgatatatatacactcatacaacaatggttttaccaattggccgcaaagaggccaaaatcgaataaacactgcctgggaggcatcaaatgattactggtatccaaattactaaagcggcaaacgacgacctgctgaactctttctggctgctggatagcgaaaaaggcgaagcgcgctgcctgtgtgccaaaggtggttttgcggaagatgacgtagttgcggtgagcaaactgggtgaaatcgaataccgtgaaatcccggtagacgtgaaaccggaagtccgcgtggaaggcggtcagcacctgaacgtgaacgtgctgcgtcgcgaaactctgctggatgccgttgagcacccggaaaaatacccgcagctgaccattcgtgtttccggctacgcggtacgttttaactctctgactccggaacagcagcgcgacgttatcgctcgtacctttaccgaaagcctgtaaggctgaagccagatgtgaaaacgccgggatatcccggcgttttttttactcttcgttggacgttgacggcgtcacggcagagcttggcttacggcgcttaccgatgtttttggtatcgcggtggcgtttcttcacccgcggcttctctttttctttctcttttttctcggcgcgtttcgccagcactttcttcgatggtttaccggttaacttctcgctcggcgcgcgggttttcgggcgcaattcatcaatcacgcgagctttcagcggttcttcaacgtagcggccgattttgcccagcagcaggtgatcgtgcgcttcaaccagcgaaatagcggtgcctttcttacctgcacggccggtacggccaatacggtgcagatagatatcggctgtgcgcggcatatcgaagttaaacacgtggctgacatccggaatatcaataccgcgcgcggcgacgtcggtggcaatcagcacgttcacgcgaccatcggtcaggcgtttaatcgcttcgttacgtttgatttgcaccatttcgccttccagccagcaggtggtgatgcctgcttcgtgcagcttagcggccagctcgtgaacgcgctcgcgtttacgcacgaagacgatagagcgggttgcttccggttgtttcagcagattaaccagcagcgcggttttatgatcgatatcatcggcgcgatagtaccactggtgaatttttttacgttcgcgggtcgacggatttgcagaaacttcaaccggctcttccagcaggcgttcggcaaagtctttaatcgcatcgccttccagcgtggcggaaaacagcatggtctgcttgcgccagcgggtttcaccggcgatggtttcgatatcctgggcaaagcccatgtccagcatgcggtccgcttcatcaaggatcagcgtttctaccgcgcggcagtcgaagttctcttctttaatatactgcagcaggcgaccggtagtggcgaccacgatatcctggttttcgctgaacacttccgcgtggttcatgtacgcaacgccgccggtaatggtggcaatatccagatgggtatgcttcgccagttcgcgggcgtgatcggcaacctgcatcgccagctcgcgggtcggcgtcaggataaggatccgcggcggccccgatttcttgcgcggaaaatcaagcagatgctgcaacgctggcagcaaatatgccgcagttttaccggtgcctgtcggcgcagaaccgagaatatcacggccatcaagcgcaggcggaatagcggcggcctgaatggctgtcgggcgtgtgaaacctttatcctggagcgcttccagcaggttttcgtcgagttcaagttcggaaaaagtcgttacagtcatgttctacctctgagtgggccgccgattatagacgttactgacgtaatgttcatctgtttgtaaggctatctgttctccggtattgtgcatagccttaagcacaggagttttcgtcagcaaggttttgaggatgtctcagtcgaagtttgcgctgccgcgcaatggttttacctttaaacaattttttgtcgcccacgatcgctgcgcaatgaaagtcggtaccgacggtattctgctgggcgcctgggcgccgattgctcaggtgaagcacgtgctggatatcggaaccggcagcggtttgttggcattaatgttagcccagcgtaccgcgaattcggtccaactggatgcggtggagttggatgaagaggccgcgacgcaggcgcgggataacgtggcggccagcaactggcctggacgcatcgccgtataccaggcgccgattcagcagtggcagccgcagccgccacggcgctatgagctcatcgtcagcaatccgccgttttttgccgaaggcgtaccttgcgcgacgtcgcagcgcgaacaagcgcgttataccacctcgctcgatcatacgacgctgctcacctgcgccgcggatctgattaccgaggagggctttttctgcgtggtgctgccggtggatattggtaatgcgtttgtcgaacgggcgaaagcgatggggtggcatttgcgcttacgcaccgacgtggcggaaacagaaatgcgcccgccgcatcgggtcctgctggcattctctcccagcgccggcgagtgtttcagcgatcggctggtggttcgtgggccagagcagcagtactctgaaggctttaccgcgctgacccgcgacttctatctctttatgtgagcaagcggcgagagcaccgacgggccgctgttttcctgcgtgtccgggtagtcgagcgtatagtgcaggccgcggctctccttacgctgcatggcgcaacgcacgataagctcggccacctgcaccagattgcgcagctccagtaagttattggagacgcgaaaacgcgcgtaatactcatccagctcctgctgcagcatagtaatgcgccgcagcgctcgttccagccggcgggtggtacgcacaattccgacatagtcccacattagcaggcgcagttcgtgccagttatgttgaatcaccaccagttcatccgggatctcaacctggctttcatcccatggcggcagctgttccgccgcttgcgccagcggcaggcgtttcgctatgtcctcggctgccgaccagccgtacaccagacactccaacaatgagttcgaggccatgcggttggcgccgtgcagcccggtgtagcttacctcaccgatggcgtatagaccgtcgacgtcggtacgtccgttatcatccaccatcacgccgccgcaggtgtagtgggcggcgggtacgataggcaccggctctttggttaaatcaataccaagtccgagtagcttttcataaatcatcggaaaatgctggcgaataaacgcttcgggcttatggctaatatccagatacatgcagtcgacgccgaggcgcttcatctcatggtcgatggcgcgggcgacgatatcgcgcggggccagttcgccgcgttcgtcgaagtccggcataaagcggctaccgtcaggccgtttcaacagcgcgccttcgccgcgcagggcttccgttaagaggaagtttctcgcctgtggatgaaacagcgcggtagggtggaactggttaaattcgagattggccacacggcatcccgcgcgccaggccatggcgatgccgtcgccggaggagacatcaggattggtggtgtattgataaactttagctgcgccgccggtcgccagcaccacggctcttgcgctgcaggtttctaccttttccttattacgattccagatccacgcgcccaccacccgccgcgtgcccggcaggccaatcttatcggagataatcaggtcaaccgcgttgctacgttccagaatggtgatattcggatgcgccagcgctttgccaaccagcgtcgtctcaacctctttgccggtggcatcggcggcatgcaggatccgccgatgactatggccgccttcgcgggtcaggtgatagctctcttcaccgttggcctgcacctgggtatcaaacagtaccccctgatcgataagccactgcacgcagggtttggcgttgctggcgacaaaggagacggcatgacggtcacaaagtccggccccggcgatgagcgtatcttcgacgtgggattcgatgctgtcggtttcatcgaaaacggcggcaattccaccctgggcgtagaaagtcgagccttcgctaaccggccctttgctcaggacggtaaccgagtggcgttccgccaggcgcagcgccagtgacaatccggcagcgccgctgccgataatcaacacatcacaggaaaagtcaggagtcgtcttcatagcttctgtttaatttactaaacacaatagcctcacgatagcacctggtggggctaaatcgtacaattattttcgtgaatagttgtgcgggctaaacaaggggggcagaaaagaaaatatgtaaacgaaagaaaatatttgcgaagcaagccgttaccttcagattttatagtgaaaaataagttgggttacgttacccttcaggcgggccttgcgctttttcttcattagcttacctggcgttgaacaacgggacttataatgagagataacaatcagtccaccgttgtcagacaaaaatcaaaagcgtaacggaactttattgtgttcagacactccaaacgtctgcttgctcataatgcagtgcttggggggtgttctgaatacgcatgggaattgggtttggggagacattacctcggatgagcgagcagttaacggatcaggtcctcgttgaacgggtccagaaaggagatcagaaagcctttaacctactggtagtgcgctatcagcacaaggttgcaagcctggtctcccgctatgtaccgccgggcgatattgctgacgttgttcaggagtcgttcgtgaaggcgtggcgtgcgctggattctttccggggggatagcgctttttatacctggttgtatcgtatcgccgtaaacacggcaaagaattatctggttgctcagggacgccgtccgccatcaagcgatgttgacgccaacgaggcggaaaacttcgaaagcggcggggcattgaaagaaatttcgaaccctgagaacttaatgttgtcagaagagctgagacaaatagtttttcgtaccattgaatcgcttcccgaagatttacgcatggcaattacgttgcgggagctggatggcctgagctatgaagaaatagccgccatcatggattgtccggttggcacggtacgttcgcgtatcttccgggcacgtgaagctattgataataaagttcaaccgctaatcaggcgttgacgatagcggaatactggaaaagggtatcaggcatgcagaaagaaaaactttcggccttaatggatggtgaaacgctggataacgagctgctcaatgagctgagtcgttcttctgaaatgcaaaaaacctgggagagctaccatctcatccgcgacacgctgcgaggcgataccgccgagatgctccaattcgatatctcagctcgcgtgatggccgccatcgagaacgaacctgctcgtcaggttgcgccgcttattcctgagtctcaacctgctccacaccagtggcgtcaaatgcctttctggcagaaagtacgcccgtgggccagctcgcttacccaaatgggtgtggcagcgtgcgtttctctggctgtgatcgtcggcgtccagcagtataacggacactccgatgcctcccagcagccggaagcgccagtcttcaacactatgccgatgatgggcaaagccagcccggttagcctgggcgttccggctgatgcctccgccggcagcggtcagcaggcgcaggttcaggagcaacgtcgtcgtattaatgctatgctgcaggactatgaattgcagcgtcgcctgcacgctgagcagcttcagtttggccaggcccagactcagcaagccgctgttcaggtgccaggttatcaaactttaggaacgcaatcgcagtaatgaagcaactttggtgtgccatgtcgctcatggcgggcagcctgttcttctccaccaacgcctcggctgatacatcgtccggggcgttgttgcagcagatgaacctggctagccagtccctcaattacgagctgtcttttgtcagtatcaacaaacagggcgttgagtcgctgcgctatcgtcacgtgcggttgaacaaccagccccttgctcagttgctgcagctcgacggtccgcgtcgggaagtggtgctgcgcggtactgaaatcagctattttgaacccggtctcgatcccttcaccctgaacggcgactatatcgtcgattccttgccgtctctggtgtataccgatttcaaaaagctggcctcgtattatgatttcatctccgttggccgtacgcgtatcgccgatcgcctgtgcgatgtggtgcgcgtagtagcccgcgacggtacgcgctacagctacattgcgtggctggatgccgagaccaagctgccgctgcgcgtcgacctgctcgaccgcgacggtgaaaccctggagcagttccgggtggtctcattcaatatcggtgataacgtaagctcgagtatggaagcgctgtcgaaagccagcctgccgccgcagctgtcggtcccggaaagcggcaataaagccaactttaactgggcgccgacctggctgccgcagggcgtgacggaagtttccagcagtcagcgtcgtttaccgaccttcgatggccctgtcgagtcgcgtctctattccgatggtctgttcagcttctccgtcaacgttaaccgcgcgacggtaaacagtagcgatcagctgctgcgcaccggccgccgtaccgtcagtacctcggtgcgcgataacgccgaaatctcagtggtgggcgaattaccgccgcagacggcaaaacgtatctccgacagtattaagttcagggccgcgcaatgatcaaagagtgggcgactgttgtctcctggcacaacggcgtggcgcaggttcactgcgatgttaaagcctcttgcagcagctgcgcctcgcgcgccggctgcggtagccgggtgctcaataaactggggccgcaaaccagccataccattagcgtcccctgtgagcagccgctgacggccgggcaaaaagtggagctgggcattgctgaaagcagcctgctgggttcggcgctgttggtctacatggcgccgctgtttgggctgtttgtgatggcatctatttttcaggtgttgtttgccagcgatatcgcttcgttgtgcggcgcgctgttgggcggcgtcggcgggttcctggtggcgcgtgggctgtcgccgaagctggctgctcgccagtcgtggcagccggtgattttaagcgttggtttaccgccggatctgctgcgcgtcgatacgccttcctctggaatggggcagtgatttcactgtccctcatctttatttacgcttcctgatacaacgccacaattctgccgttatgctggatctaacagcatttcctggtttcgcggatgtagtgtagaatgcggcgttttcggattaaaaaacgtcaggcacagaacagcggcctcatgagactcgtaaggcataattaactctaaatatgaagaatatacgtaacttttcgatcatcgctcacatcgaccacggtaagtcgacgctgtctgaccgtatcatccagatttgcggtggcctttctgatcgcgaaatggcggcccaggttctggactccatggaccttgaacgtgagcgcggcattaccatcaaggcgcagagcgtcaccctggactataaagccagcgatggtgaaacttatcagctcaactttatcgacaccccgggccacgttgacttctcctatgaagtatcgcgctccctggcggcgtgcgaaggcgcgctgctggtggttgacgccgggcagggtgtagaagcccagaccctggcgaactgctataccgcgatggaaatggacctcgaagtcgtcccggttcttaacaagatcgacctgcctgcggccgaccctgagcgcgtagcggacgagattgaagatatcgttggtatcgacgctcacgacgcggttcgctgctcggcgaaaaccggtgtcggcgtgccggatgtgctggaacgtctggttcgggatattccgccgccggaaggcgatccggacgcgccgctgcaggcgctgattatcgactcctggttcgataactatttaggcgtcgtgtcgctggtgcgtattaaaaacggcaccatgcgcaaaggcgacaaaattaaggtgatgagcaccggtcaggtctataacgccgaccgtctgggcatcttcaccccgaaacaggttgaccgtaccgaactgaaatgcggcgaggtgggttggctggtttgcgctattaaagacatcctcggcgcgccggtgggcgataccctgaccgcggcgcgtaatccagcggataaggcgctgccgggcttcaaaaaagtgaagccgcaggtctacgccggtctgttcccggtgagctctgatgactatgagaacttccgcgatgcgctgggtaaactgagtctgaacgatgcatccttgttctatgagccggaaagttctacggcgctgggcttcggcttccgctgcggattcctcggcctgctgcacatggaaatcattcaggagcgtctggagcgtgaatacgatcttgacctgattaccaccgcgccgacggtagtctatgaagtagaaaccacctctaaagaggttatctacgtcgatagtccgtcgaagctgccgccgctgaataatattcaggaactgcgtgagccgatcgccgaatgtcacatgctgctgccgcaggagttcctcggcaacgtgatcaccttgtgtatcgagaaacgcggtgtgcaaaccaacatggtttaccatggcaaacaggttgcgctgacctatgaaatcccgatggcggaagtggtcctcgacttcttcgaccgtctgaagtccacctcccgcggctatgcgtcgctggattataacttcaagcgtttccaggcctctaacatggtgcgcgttgacgtgctgatcaacggcgagcgcgtcgatgcgctggcgctcatcacgcacaacgacaacgcgccgtatcgtggccgcgagctggtcgagaagatgaaagatctgatcccgcgtcagcagttcgatatcgcgattcaggcggctattggtaaccacattatcgcgcgctctaccgtgaaacagctgcgtaaaaacgtcctggcgaaatgctacggcggcgacgtcagccgtaagaaaaagctgctgcagaagcagaaagaaggtaaaaagcgtatgaaacaggtcggtaacgttgaactgccgcaggaagcgttcctcgccattctgcacgttggtaaagacggcaaataatctaaggagttggcatggcgaacatgtttgccctgattctggtcattgcgacccttgtgacagggctgttgtggtgtctggataagttcatattcgcaccaaaacgtcgtgaacgtcaggccgctgctcaggcagcgaccggcgagcaactggacaagaagacgctgaagaaagtcggcccgaaaccgggctggctggaaaccggcgcctcggtcttcccggtactggcgattgtgctgattgtgcgttcgtttatctatgaacctttccagatcccgtcaggttcgatgatgccgactctgctgattggcgattttatcctggtggagaaattcgcctatggcattaaagatccgatctaccagaaaacgctgatcgaaactggtcatccgaaacgtggcgatatcgtggtgtttaaatatccggaagatccgcgtctggactacatcaaacgcgcggtcggtttgccgggcgataaagtcacttacgatccggtggctaaacaggtgacgattgagcctggctgcgcgtcgggtcaggcatgcggtagcgccttgccgatcacctactccaacgtcgaaccaagcgatttcgttcagaccttctcccgccgcaacggcggcgaagccaccagcggtttctggcaactgccgaaaggcgaaaccaaagccgatggtattcgtctgaccgagcgtaaagagacgctgggtgaagtgacccaccgtattctgacggtacccatcgttcaggatcaggtggggatgtactatcgtcagtccggccagccgctggcaacgtgggtcgttccgccgggtgaatacttcatgatgggcgacaaccgcgacaatagcgccgacagccgttactggggcttcgtgccggaagcgaacctggtgggtaaagctaccgccatctggatgagcttcgaaaaacaggaaggcgagtggccaaccggcgtacgtttatcgcgcattggcggcatccactaattccccgtcttaattcacgctgccagcgcaataacggcagcgtgaattatttagtatttaaatccatccaaactaacgacatcccttgtcgttgcgtatagaatatccccccgaagtttttggttgtctctcgaaagagtgacactgcacacgaaaccgcgttggttagtttctgcccttatatatcaagggtatgtatgctcaggtcggtttcgtgtgctgcatctttgacgcattcatttattggtaacgcatgaaccccatcgtaattaatcggcttcaacgaaagctgggctacacttttgttcatcaggagctgttgcaacaggcattaactcaccgcagtgccagcagcaaacacaacgagcgtctcgagtttttaggcgactctattttaagttttgtgatcgccaatgcgctctatcatcgtttccctcgggtagacgaaggggatatgagccgtatgcgcgcgacgctggtgcgaggcaatacgctggcggaaatcgcccgcgaatttgaactgggcgagtgcctgcgccttgggcctggcgagctgaagagcggcggttttcgtcgcgaatcgattctggctgataccgtagaagccttaatcggcggggttttcctcgacagcgatattcagaatgttgaacgcttaatcctctcctggtaccagactcgtctggacgaaatcagcccgggcgataagcaaaaggatccgaagacgcgtctgcaggagtatctgcagggtcgtcatctgccgctgccgtcttacctggtcgtccaggtacgcggcgaagcgcacgatcaggaatttactatccactgccaggtcagtggcctgagtgaaccggtggttggcacaggttccagccgtcgcaaggcggagcaggctgccgccgaacaggcgctgaaaaaactggagctggaatgagcgaagaaaaaagttattgcggatttgtcgccatcgttggtcgtccaaacgttggcaaatccacgctgttgaacaagctgcttgggcagaagatctcgatcacttcccgtaaagcgcagactacccgtcaccgcatcgtcggtatccataccgaagggccgtatcaggcgatttatgttgataccccgggcctgcatatggaagagaagcgcgcgattaaccgcttaatgaacaaagcggccagcagctcgattggcgatgtggaactggttatcttcgttgttgaaggcactcgctggacgcaagatgacgagatggtgctaaacaagctgcgtgatgcgcgcgcgccggtgattctggccgtcaacaaagttgataacgtgcaggagaaagcggatctgctaccgcacctgcagttccttgccagccagatgaacttcctcgacattgtgccgatctctgcggaaaccggcaccaacgttgatactatcgcgtcaatcgtacgtaaacatctgccggaagcgattcatcacttcccggaagattatattaccgaccgttcccagcgctttatggcctccgagatcatccgcgaaaagctgatgcgtttcctgggcgctgaactgccgtactccgtgaccgtcgaaattgaacgtttcgtgagtaacgaacgcggcggttacgacatcaacggcctgatcctcgtcgagcgtgaagggcagaagaagatggtaattggcaacaaaggcgccaaaatcaaaaccatcggcatcgaagcgcgcaaagacatgcaagagatgtttgaagcgccggtgcacctcgaactgtgggtcaaagtgaaatccggctgggccgatgacgagcgcgcgctgcgcagtctcggttacgttgacgacctctgagttaacgcaacgtggatggatggcagcgcgcctttgtcctgcatagccgaccgtggagcgaaaccagtctgatgctggacgtctttacggaagagtccggtcgcgtgcgcctggttgccaaaggcgcacgctccaaacgctctaatctcaagggcgccttacagccctttacccccttactggttcgcttcggcggccgcggcgaagtcaaaacgcttcgcagcgcggaagccgtctcgctggcgctgccgctcagcggtatcacgctctacagcggtctttacgttaacgaactcatctcccgcgtgctcgagcacgaaacgcgcttctctgaactttttttcgactacctgcattgcatccaggcgcttgccggggccagcggttcgccggagcccgcgctgcggcgctttgagctggcgctactcgggcacctgggctatggcgttgatttccttcactgcgccggcagcggcgacccggtggatgacaccatgacctaccgctatcgcgaagaaaaaggctttatcgccagcctggtgattgataacagcacgtttaccgggcaccatttgaaagcgttggctagccgcgagtttccggatgtagatacgctgcgcgccgcgaagcgctttacccgcatcgccctgaagccgtatcttggagggaaaccgctcaagagccgggaattgtttcgccagtttatgcccgcgcgaaaggcgcgagccgataatacgaataatgattaacgaggattgtcatggctgaattactgttaggggtcaatattgaccacattgcgacattgcgtaacgcgcgcggtaccgcttatccggatccggtgcaggcggcttttattgctgaacaggccggcgccgatggtatcaccgtgcacctgcgcgaagaccgccgccatatcaccgatcgtgacgtgcgcatcctgcgccagacgttgcatacccgaatgaatcttgaaatggcggttaccgaagagatgctggcgatcgcctgcgaaactaaaccgcacttttgctgcctggtgccggagaagcgtcaggaagtgaccaccgagggtgggctggacgtggccgggcagcgcgataagatgcgcgatgcctgtcagcgcctggcggatgccggtattctggtctccctgtttatcgacgcggatgatgagcagatcaaagcggctgccgaagtgggcgcgccgtatattgaaatccataccggctgctatgccgatgccaaaaccgatgccgaacaggctaaagagcttgagcgtatcgccaaagcggcgacctatgctgccagccttggcctgaaggtgaacgccggtcacggtctgacctatcacaacgtgaaagccattgccgccttgccggaaatgcacgaactgaatatcggccatgccattattggtcgcgcagtgatgagcggcctgaaagaggctgtcgcggaaatgaaacgcctgatgctggaagcgcgcggctaatggcgattcttgggctgggtaccgacatcgtcgaaatcgcccgcatcgaagcggtgatcgcccgtagcggcgatcgcctggcgcgccgggtgctgagcgatcacgaatggagcatttgggagcaacatcagcagccggtgcgttttctggcaaaacgctttgcggtcaaagaagcggcggcgaaagcgctcggaaccggtattcgcaacggcctggcgtttaatcagttcgaagtttacaacgatgaattgggcaagccgaaactgcggttatggggcgaagcaaagcttttagccgaacggatgggggtaagcgctattcacgtcactctcgccgatgaacgccactacgcctgcgccacggtgatcgtcgaaagctaaacccgcggttaaagcttatccgcgtggtgcatgagcacgaatttatcccacaactgttcttcattctcgacgtgcgccggatctttgagaatagtattcgggatcgggcacactttctggcaggttggcgtgtcgtagtggcccacgcactcggtgcagcggtcgctgttaatctcataaatgctctcgcccatcgaaatggcctcattcgggcactccggttcgcacatatcgcaattgatgcattttttggtgattaacagcgccatcaggaaaatctcagaaacaacacaaacagggcgggcattatacgcccattttctactcagaccagctttttcaccagcgcttcgctatggcgtatgcgttccggcgcgtgttcaagatcttgctgcaccagcgccataaagaggagatcggtgagcatcatttgcgcgctggtggaggagatggctgcgctgcgcgtcgcctgctcctcagcgatggtgtaaaggcactgcgaggcctgctgctgtaaggcattgggagtaaacccggtgatcgcgaggatcttgctgccgacgcggagcgcttcagcggccgccatattgatctcgcggcgttcgccggagtaggagatagccagcagcagatcgtccgccgacatcgcctgcaccgttgccagcagcgcatgcatatcttgctcggcgacggcgttgatgccaattttcattaacttccagctaaaattgcgcgccaccagcccggaggcgccgatgccggtaatgatcacccggcgagcatcgcgcagcagggccactgcttccagaagtttctcttcgctgttgacgtccagcgaggcgtgcatcgccgcgatgttatctttgatcagcttttcacccaccagacgcagcggatcgtcgccgcgaatttggttatgtactggcacagagtgcggatccggactgctggccagcgcttcgctcagcgccagttttaatgccggaaagcctttgaaccccattttttgcgcgaacttcaccacgctggactggctgacgcccgcttcgcccgccagctgctgtgagctgagatggcgggtttggtccggctgagccagaataaagtcggcaagttttttgtcgctcgccgccagcgacgggtaacgttggcggatgcggattaaacagttcatggcttctccgaaggagggcgttagcggctgaaagaattttgtattcgattataagtggaatagtacgaattaaaaattctgctgtgaagaattatgcgaatgggtcagattctgaatcttacctcaaccgtggcagacaatttcgcgctcgtcgcggcaagcctgttaagctatcggcatcgccaggaaaatccgtaccagaaaggagttcggtttgaacagtaacgcgcgacgagtcgtgtttttcgatcttgatggcacattgcaccagcaggatatgttcggcagctttattcgttacctcttacgtcgtcaaccgctcaacatactgtcagtggcggccttgtcgccaatagtactgctgggcctgttggttaacggacgcgcggcgcgctggccgatgagcctactgctgtgggccgccacctgcggccggcgtgaaagccatcttaagcgtctggaggcggagttcgttagctggtttcgccagcacgtgaccgcctttccggtggtacagggccggctaaacgactatttaaccagtaccgatgccgacgtctggctgattaccggctcaccgcagtcgctggtggaacaggtctatgccgatacgctttggctgccgcgcgtaaagcttatcgccagtcgcatgagccgccgtcgcggcggctgggtgctgacgctgcgttgtctgggccatgagaaagtagcgcagctggaacagcggatcggcgcgccgctacgcttatatagcggctatagcgatagcgagcaggataacccgctactctgtttttgccagcatcgctggcgggtgacgccgcagggcgatctccagcagctcgaataattccgctgcaggcgaattatttgggcgatatatagcgcccatgtataatgcgccccgctttttctgcaggagtgccgctgtgtctgaccacgaatttaatgatgaatactggatgcgccatgcgctgacgctggcgaaacgcgcctgggaagagggcgaggtgccggtgggcgccgtgctggtgcataacaatcaggtcatcggcgagggctggaaccggccaattggtcgtcacgatcccaccgcccatgccgaaattatggcgctgcgtcagggagggctggtcctgcagaactatcgtttaattgatgccacgctgtacgtcacgctggagccttgtgtgatgtgcgccggggcgatggtgcatagccgcatctcgcggctggtgttcggcgcccgcgatgctaaaaccggcgcggccgggtcgttaatcgatgtgctgcatcatccggggatgaaccaccgggttgaaattaccgagggaattctggctgaatcttgctccgcgatgctgagcgacttcttccgctggcggcgggaagagaaaaaggcattgaagaaagcgcgtcaggaagagggctaacgtcccattgtcggcaacttcagcttaacgttgtcgacgagcttttcgccgcggaatttaaagaagggcatcgcatactctttatgctcgctatcgagttcttccggcgtaacggctggataatcttcagcaatcgccatctcctgcgccgctttcctttcctgttcagacaaatatccaaccaggctgatatggtacttacgaatattttccacgtaggcgtaagcctcatggccgcgggcgtagccatattttaagcggctgtagtagggcttctggctcagcaatggcagacgctgcttaacgtcggaccagctgttcgggttgcctttttgttttttagtcagcgccattgcgtcaagcatatgcgcatagcccatattataggccgccagcgcaaaccagatccgctcctctttcgggatcgcctccggcactttggccatcatatcctgcagatagcgcatgccgccgtcgaggctctgttcggcatcggtacgatcggtcagacctaaactctgggcggtgttacgggttagcatcatcataccgcgcacgccggtcggcgaggtggcctgcggatcccagtgcgactcctgccaggcaatcgccgccagcagtcgccagtcgatttgtcgggcgtatttctcaaacagcggcttcagatccggcagcgtattctgtaccgcgcgcaggaaggtgcgggtatcaacatagtcgaagtcgttgccgtggccgagatacttctcttccaggcgggcgagggtgccgtcttcattcatactattaaagaaatcgagcatggctgccgatagtgaattgtcttcgcttttttcgctaaaccaggtgaccggctgttcatcgctgatgtcgagagccaccgccagctccggatgtacgcgctggaacaggctgacggcgacggaatcggcgacggtatattccagcgtgccgtcgatgaccgcctgcatcagagcggtggtgccgcgcttttcatcaacgcgccagttgaggtccggatacttgctctccttcagcgcctgcaagtcgttaagggcgacgtggcctggggcgatggcgagctgttcggcgttgatcccggccagcgtacgcggacgattaccgccaacgcgatagaccagctgctgcgaaacggaataataggtggggcccgcctgatagttttttacccgctcggtgttatagaccagcccggcggccagcatatcggttttaccggcatcgagatcgtcaaacaattggctgatattctgccgcacggtgactttcagcttcaccccaaggtaatcggcgaagcgtttcgccagttcgtaatcgagaccgtagtctttgttgttgatggcagcgtaggtcagcggtgagttaattgtactcacgcgcagttcgccgcgagcaatgatcccggcaacgcggttctccggttttcccatccacggtaaagacggccacagcgccgccgccaacaaaagggtgacgacgccgatcagcagataattaatctttaattttttcaaatagttaattttctgcagcgtggagttcctcagctgggtatatccgggaaaagtaaaaggttgccgtaagttgagcggcattttgcttaagaatgcgccagttggcaacatattcgcgattcatgtcacatttattgataaaactgatgaatcattttatttctacgcaaacggtttcgtcggggctcaggattctctataatggcgcccgtttccccctggctcaccttgaaagcttcgaagacgagagacttatgatggatattttgcgtggttcacctgcactgtcggcattccgtatcaacaaactgctggcacgttttcaggcggccaacctgccggttagcaccttatacgcggagtatgttcactttgccgacctgagcgccccgctaagcgatgaggagcgcgaaagactggtcagactgcttaaatatggcccaagcctcagcagccatacgccaaccggtaaattactgctcgtcacccctcgccccggcactatctccccctggtcctccaaagctaccgacatcgcccataactgcggtttatcgcaggtcgtgcggctggaacgcggcgtggcgtactacgttgaagcacagggtctgagcgatgcgcagtgggacgccgttgcggcggagctgcacgatcgcatgatggagagcgttttcactgagctggaagagggagagaagctgtttgctcaccatcagccgacaccggtggccagcgtggacctgttgggccagggacgtcaggcgctgattgacgccaacctccgtctggggctggcgctggccgatgacgaaatcgactacctgcaggacgcattcgttaagcttggccgcaatccgaacgacattgaactgtatatgttcgcgcaggccaactcggaacattgccgccacaaaatttttaacgccgactggattatcgacggccaacaacagccgaagtcgctgtttaaaatgattaaaaataccttcgagaaaaacccggaatatgtgctgtctgcctataaagacaacgccgcggtaatggaaggttccgaagtcggacgctatttcgccgactaccagaccgggcgctatgacttccatcaggagccggcgcacattctgatgaaagttgaaactcacaaccacccgacggcgatttcgccgtggccgggcgccgcaaccggctccggcggcgagatccgcgacgaaggcgccacggggcgcggcgcgaagccgaaagcgggtctggtcggcttctcggtgtctaacctgcgtatcccgggttttgaacagccgtgggaagaggatttcggtaaacctgagcgtatcgtgaccgcgctggatatcatgaccgaaggcccgttgggcggcgcggcgtttaacaacgaatttggtcgtccggcgctgaatggctacttccgtacctatgaagagaaagtgaccagccacaatggcgaagagctgcgcggctatcacaaaccgatcatgctggcgggcggtattggcaacatccgcggcgagcacgtccagaagggcgaaatcaccgttggcgccaagcttatcgtgctgggcggcccggcgatgaacattggtctcggcggcggcgcggcgtcatccatggcttccggccagtctgatgccgatctggatttcgcctctgtacagcgcgacaacccggaaatggagcgccgctgtcaggaagtgatcgaccgctgctggcagctgggcgatgcgaacccgattctgtttatccacgacgttggcgcgggcggtctctctaacgccatgccggagctggtgagcgatggcggccgcggcggaaaattccagctgcgcgatatcctcagcgatgagccgggcatgagcccgctggagatttggtgtaacgaatcccaggagcgttacgttctggcggtcgcgccggaacagctgccgctgtttgaagagctgtgccgccgcgagcgcgcgccttatgcggtgatcggcgaagccacggcggagcaacaccttagcctgagcgacagccactttaacgatcggccgatcgacctgccgctggacgtcctgctcggcaaaacgccgaaaatgacgcgtgacgtgcaaacgctgaaagcgcagggcagcgagctggatcgtcaaccaatgacgattgccgatgcggttaaccgcgtgctgcatctgccgacggtggctgagaaaaccttccttgtgaccatcggcgatcgcaccgtgaccggtatggtggcgcgtgaccagatggtggggccgtggcagatcccggtcgccaactgcgcggtgaccaccgccagcctcgatagctactacggcgaagcgatggcgatgggtgaacgcgcaccggttgcgctgctcgactttgccgcctctgcccgcctggcggtcggcgaagcgttgacaaacatcgccgctacgcagattggcgaactcaaccgcgtcaaactgtcggcaaactggatggcggcagccggtcacccgggtgaagacgccggcctgtatgaggcggtaaaagcagtcggtgaagaactgtgtccagcgctgggcctgactatcccggtgggtaaagactcaatgtcgatgaaaacccgctggcaggaaggaagcgagcagcgcgaaatgacctcgccgctgtcgctggtgatctccgcatttgcccgcgttgaagacgtgcgcggcaccgtgactccgcaactctctacggaagataacgccctgctgctgatcgatctcggcaaaggtcgtaacgcgctgggcgccaccgcgctggcgcaggtctatcgccagctaggcgaccagccggccgacgtgcgtgatgtcgcgcagctgaaaggcttctgggacgcgatgcaggcactggtggcgcagcgtaaactgctggcctaccacgaccgctccgatggcggactgttagtgacgctggcggaaatggcgttcgccggtcactgcggcgtaactgccgatatcgccgcgctgggcgacgatcgtctggcggcgctgttcaacgaagaattgggcgcggtgattcaggttcgcgccgcggatcgcgaagcggtggaagcgctgctggcgatgaatggtctggcagattgcgtgcactacttaggccaggcgacggcaggcgatcgttttgttatcaccgccgacggtcagccgctgttcagcgaaagccgcaccacgctgcgtatgtggtgggcggagaccacctggcagatgcagcgcctgcgcgataacccggaatgcgccgatcaggagcaccaggcgaagtctaacgatagcgacccgggccttaacgttaagctgtcgtttgatatcaatgaagatgttgctgcgccgtatattgcgaccggcgcgcgcccgaaagtggctgtgctgcgcgagcagggggttaactcccatgttgaaatggccgccgctttccatcgcgccggcttcgatgccatcgacgtgcatatgagcgatctgctggcgggtcgtactggtcttggcgacttccatgcgctggtggcctgcggcggtttctcctacggtgacgtactgggggcaggcgaaggttgggcgaaatcgattctgttcaacgaacgcgtacgcgatgagttcgccactttcttccatcgcccgcagacgctggcgctgggcgtgtgtaacggttgtcagatgatgtccaacctgcgtgagctgatccctggaagcgacctgtggccgcgcttcgtacgcaaccactctgaccgctttgaagcgcgtttcagcctggttgaagtcacccagagcccatcgctgctgctgcagggcatggccggttcgatgatgccgattgccgtttctcacggcgaagggcaggtggaggtgcgggacagcgcgcacctggccgcgcttgaaagcaaaggcctggtggcgctacgtttcgtcgataacttcggcaaagtgacgcaaacctatccggcgaacccgaacggctcggtgaacggcattaccgcggtgaccagcgaaagcggtcgcgcgacgatcatgatgccgcacccggaacgcgtcttccgtaccgtcagtaactcctggcacccggaaaactggggtgaagacagcccatggatgcgtatcttccgcaacgcgcgtaagcaactgggttaataccgctaagttgatgaaaacgggccccctgttaattcagggggcttttttatttgtgatcgaggccgtatcagagtgtcgggaattaccgacagacgcggtttaatggtgtctctgaatgacgacacttaagctattgattttaaatatgtgtaattgaggactgatttgttgttgccaattggcgacactatggtcaaagaatagacaaatgaattttagtgggttattgcatgtaattcgttatatatcatactgttaataatttgttttgaaaggtggcatagttcgtgcataataatcagcagtggctcattcaccttcttatgtcagccccttcgggaagcgctacataaacttcgaatgacgcacaaacaggtgcctgccgtccaactcctgataacagctctgctttatcagtcatcgggcgaaacgtcgagtaaggcaccgcctcattccttaataaaggcaggctttagagcctgcctttattgtttctgccgtggatgtttccgccatcctcagttagcatcttcaggagctaatggttgaggctatatctttgaagcgattctctcttttcccccgttccttgcgccaactggtgacgctgtcctttgtgctgatcatgctgccgctgttggtgctggcatggcaggcctggcaaagcctgaacgcgctcagcgcccaggccgcgcatattaaccgcaccaccttgactgatgcgcggcgtagcgaagcgatggtcaacgcctcgctggaaatggagcgtagctatctccagtattgcgtgctggacgatcctactcttgagcgggtctatcaaaatcaacgtaagcgttatagcgaaatgcttgaggcgctctccggcgtgttgccggatgctcacatttggcagaccctgcggcagaacctcgccgacctggcccaattgcgttgccataatagcgcgccggacgtcaaagccgcggcgagcctcgaagcctttgccgatgctaacagtgaaatggtgcaagcgacccgcacggtaatcttctcccgcggccagcagctacagcaggagatcgccgagcgcgggcagttcttcggctggcaggcgctggttctgtttctgctgagcctgacgctggttttgctgtttacccgcatgatcatcggcccggtgaagggcatcgagaagatgattaaccgcctgggagagggaaagtcgctggatgatgcggcactgttcaccggcccgcgcgaactgcgatcggtcggtaaacggattatctggttgagtgaacgtctggcgtggctggagtcccaacgccaccagtttcttcgtcatctgtcacatgaactgaaaacaccgctcgccagcatgcgtgaaggtacggaactgctggcggaccgggtagcggggccgctgacgacggaacagcaagaaatcgttgagatccttgataacagcagccgcaatctgcaaaagctgatcgaacagctgctcgactataaccgcaaactggccgatggcccggtcgagcggcagaaagtggatattgccgaactggcgcagaccgtcgtttccgcgcatagtttaccggcaagagccaagatgatgtctaccgagctggcgctgggtgaacgcttctgcctggcggagccgacgttgctgaccagcgtgcttgataatctgtactccaatgcggtgcactatggcgctgaatccggtaacattcggattcatagttaccgccacggcgagcaggttcgtatcgatgtcgccaatagcggcgagccgatccccgtcgccgaaagaaatatgattttcgagcctttttatcagggaagccacctgcgtaaaggggcagtaaaaggcagcggtctggggttgagtatcgcccgcgactgcgtacggcaaatgcagggagagctgagcctggtcgatgataatcccgggttcatctgttttcgcatctcgctccccgccgctgagccgggaaaaaccaacacatgaatcaacattgggtgaatatgtccctctttttcgcattgcgccgtcctttacggggatggctgctgtcgggcctatgctgcctgacgctggcgggttgttctgccgctatgtcgccgcgcgccgcagacggcaatgcgccgcccgagctaccggaacatcaggtggcggattttctctccgtagattgcgctaatatctggtcgctggaaaacgatgccagtgataagaacccgctgtattggctgcgtggtattgactgcgcggatcgcctggcgccggtacaagcccgcgccgaagccaaattgcataacgatgataactggcaggatgcgttgaaacgcggcattctgctggccgacgccaaaatcacccccgatgagcgtcgcgaaatggttgcccgcatcgacagctttagcccgcaaatcgccgcgcaggttcgcccgctgtaccggctgtggcgcgatggccaggcccggcaattgcagttatttgaggagcgctcccgctacggcaaactccagcaatcgagcgatgctgaactggaaaccttgcgtcagcaggagcagcagttgcgtagccaactggagctgaccacccgcaagctggaaaaccttaccgatattgagcgccagctctccagccgtaagcccggcggcaattttaatagcggtagcgacaaggtaccggaggtgatccatgacgatccgtaaacccgcccacctgttgctggtggacgacgatccggggctgttaaagctgctggggatgcgtctggtcagtgagggttatagcgtggtcacggcggaaagcgggcccgaggcgctacgcgtgctgacgcgcgagcgggtggacctggtggtgagcgatttacgcatggatgaaatggacggcctgcagctgtttgctgaaatccagaaggcgcaacccggcatgccggtcatcatcctgaccgcccacggctctattcctgacgccgttgccgctacccagaaaggggtgtttagttttctgactaaaccggtcgataaagacgcgctatataaagcgattgacgatgctctcgagcagagctcgccggccaccgacgagcgctggcgacaggcgattgtcacccgtagtccacagatgctgcggctgctggagcaggccggtatggtggcgcagtctgacgttagcgtgttgattatcggccagagcggtaccgggaaagagattgtcgcccaggcgatccacaacgccagcccgcgccacgaaaaaccgtttatcgcgattaactgcggcgcgttgccggaacaattactggagtccgaactgttcggccacgcgcgcggcgcctttaccggcgcggtcagcaaccgcgaagggctttttcaggccgccgagggcggtacgctgtttcttgatgaaatcggcgatatgcccgtcgcgctgcaggtaaagctgctgcgcgtcctgcaggagcgtaaggtgcgcccgctgggcagcaaccgcgatatcgacatcgacgtgcgcattatttcggcgacccaccgcgatctaccgaaggcgatggcgcgcggcgaattccgcgaagatctgttctatcggctcaatgtcgttaacctgaagatcccgccgctttccgagcgcgcggaggatatcccgctactggccaatcatctattgcgccagtccgccgaccgtcacaaacctttcgtgcgcgccttctccaccgatgcgatgaagcggctaatggccgccaaatggccgggcaacgtgcgtcagttggttaacgtgattgaacaatgtgtggcgctgacctcatcgccggtgatcagcgatgcgctggtggagcaggcgctggagggggagaataccgcgctaccgaccttcgtcgaggcgcgtaatcagtttgagctcaactacctgcgtaagcttttgcagataaccaaaggtaacgtgacgcatgccgcgcggatggccgggcgcaaccgcaccgagttttacaaactgctgtcgcgccacgagctcgacgccaacgactttaaagagtagccccgcggcatagcgcaagctatgatacggtaagcaaccggttacgcgacaaagacaggaaaaccatgaaaaagattgatgcgattattaaaccgttcaaattggatgacgtgcgtgaagcgctggcggaagtcggtatcaccggcatgacggtcaccgaagtcaaagggtttggtcgtcagaaagggcataccgagctgtaccgcggcgcggaatatatggtggattttctgccgaaggtgaaaattgaaatcgtggtgacggacgatatcgtcgatacctgcgtcgataccatcattcgtaccgcccagaccggtaaaatcggcgacggtaaaatctttgtcttcgacgtggcgcgggtgattcgtatccgtaccggtgaagaagacgacgcggcgatttaatcctcgccgctcgctgcagtattgccgggtggcgctgcgcttacccggcctacaaatccccgcgtcgttgggcttacagaaccttatgcgggccgaaacattcgtaatgaatgttgtctttattgacccctaattctaccagctgcttcgccgcaaactgcataaacgctaccgggccgcagagatagaattgcatctgcgggtcgcgaatattttccgccagcggcgctaaatccatcaaaccttcgctatcaaaacgtcctgcctgacggtcggcctcgctcgggctgcggtaccagacgtgagaggtaaacttcggtagcgccgcgccaagcgccttcacttcgtccgcaaaggcgtgaacgtcaccgttttccgccgcgtggaaccagttcacctggccctgatgatggcttttggccagcgtatccagcatcgccagcattggcgtttggccgacgccgccggagagcagggtcaccggcgtctgcgcttccacgttgaggaagaagtcgcccgctggcgcggctaaatagactacgtcgccttcgctggcgtggttatgcagccagttggacacctggccgccattctcgcgtttcaccgcgatgcgatagcctttaccgtccgctctgcgggtcagagagtattgacgaatttcctgatattcgaaggcttccggcttcaaccagatagccagatactgtcctggctggtaatcggcgaccggctgaccgtcgacaggctccagttcaaagctggtaataagctggctgcgcggggtcttcttaacaatgcggaacgcgcgggtaccttcccagccgccatttttactggcgttatcctgatagatctccgcttcgcggttgatgaagacgttcgccagcaccccgtaggctttgccccaggcgtcgagtacttcttggcctgggctaaacatttcgtcgagggtcgccagcagatggctgccgacaatattgtactgctccggtttaatctggaagctggtatgtttctgggcgattttttcaaccgccggcagcagggccggcaggttgtcgatattactggcgtaggcggcgatagcgttgaacagcgcttcgcgctggtcgccgttgcgctggttactcatattgaagatctctttgagctccgggttatgagtaaacatgcggtcataaaaatgcgcggttagctttgggccggtctctacaagcaggggaatggtggctttgaccgtggcgatggtttgagcgtcgagcatagcagcttccttaaatgttatcctattgatgcatttcaaatgcatcttatataaataaccctgctatgtaaatggttctttatcactttgccgcaaagcagttacaacatgaagaatttgcatcacaaagctgaaaagaaatccgttgataatgtttgatgcgttattgctcaaagccttgtgtgctgtggagccaatcgtttgcgtaaaatcctttgtcaagacctgttatcacagaatgattcggttatactgtgggccgttgtccatcaggaccgcctttttaggccaaaattttatcgttagctgagtcaggagatgcggatgttaaagcgtgaaatgaacattgccgattatgatgccgaactgtggcaggctatggagcaggaaaaagtacgtcaggaagagcacatcgaactgatcgcctccgagaactacaccagtccgcgcgtgatgcaggctcagggttcccagctgactaacaaatatgccgaaggttatccgggcaagcgctactacggtggctgcgagtacgtggatatcgttgagcaactggctatcgaccgcgcgaaagaactgttcggcgccgactacgctaacgtgcagccgcactccggctcgcaggctaactttgccgtctataccgctctgctgcaaccaggcgataccgtgctgggtatgaacctggcgcaaggcggccacctgacccacggttccccggttaacttctccggtaaactgtacaacatcattccttacggtatcgatgagtccggtaaaattgactacgaagacatggcgaagcaggcccaggagcacaaaccgaagatgatcatcggtggcttctccgcttactccggtatcgttgactgggcgaaaatgcgtgaaatcgctgacagcatcggcgcttacctgttcgtcgatatggcgcacgtagcgggcctgattgccgccggcgtttatccgaacccggttccgcacgcccacgttgttactactaccacccacaaaaccctggcgggtccgcgcggcggcctgatcctggcgaaaggcggtagcgaagagctgtacaagaaactgaactccgccgtgttcccaagcgcgcagggcggcccgctgatgcacgttatcgccgcgaaagcggtggcgctgaaagaagcgatggagccagagttcaaagtttaccagcagcaggttgccaaaaacgccaaagcgatggtggaagtgttcctgaaccgcggttacaaagtggtttccggcggtactgaaaaccacctgttcctgctggatctggtagataaaaacctgaccggtaaagaagctgacgccgccctgggccgcgccaacatcaccgttaacaaaaacagcgtaccgaacgatccaaagagcccgttcgtgacttccggtatccgtatcggttctccggctgtgactcgccgcggctttaaagaagcggaagtgaaagagctggctggctggatgtgcgacgttctcgacaatatcaacgacgaagctgttattgagcgcgtcaaaggtaaagtgctggatatctgcgcccgtttcccggtttacgcgtaatcttaccgcgttaagataaaaaaggccgcgattgcggccttttttgtgtctgctggttatcgacggtccagcgaaatcgaaccgggtccggttatcgccagcagcaggaaggccccggcgatactgacgttcttatagaagttaatcatattcggcaataccgcatcgccggtcatatcccagtaatgatggccgataaccgcggtacccagggtgtaaaagataaagatcaccgccagcgggcgggtgaagaaacctaaaataatcagaatagcggcgggtacctccatgatgaccgcgatgatcgccgccagcgtcggcatcggcgcgccggaagaagccatatattgtaccgttccgctaaaccccatcagtttcggatagccaaaaataatgaacagcagcacgatcgcaatacgtgcgattaacagcaggacagggcgggaagagccaaagtcaaaatagcgtagcgtgttcataatcagtcctttatcacaggcgtgtgatctaaacgtaatacacatttttactccccgccacgctgggaaaataatattgttgcgcctcgttgagcggcgattaagccgatacgagggaagcgctctgatgcccggttatcggattttttttcatactgcgcgccatgtcgcacactcatcgcgtgacaatgctcacgattttaagagaaatgtacttaacgaccatgaagatagtgagacatgggtttgctcagtatgcgctttatcgccagactagagcttccattcgggagggaatcatggtcttgcactccacgcgctggctggcgctaagttacttcacctacttttttagctacggtatttttttaccattctggagcgtctggctggcaggcgttggcctgacgccggaaaccattggcgtgctgctcggcgccgggctggtggcgcgttttctgggcagcctgctaattgcgccgcgggtcagcgatccttctcgtttgattagcgccttgcgaatcctggcgttgctgacgctgctgtttgctctcgccttctgggtcggtgggcaggtggcctggctgatggtggtcatcgtcggattcaacctctttttctcgccgctggtacccttaaccgatgcgctggccaacacctggcaaaagcagatcaccatggattacggccgggtgcggttgtggggatcgattgcttttgtcatcggttctgcgctgaccggcaagctggtgagtctgtttgattaccgggcgatcctgttgttgttaagcctgggcaccgcttcgatgctgttgggcatgctgctgaaaccttcagtgatgccgcagggggagagccgccatcaggaggcggccggactaccggcgtggcttagcctggtgcggcaaagctggcgttttctagcctgcgtctgtctgttgcagggagcgcatgccgcctactatggcttcagcgcgctatactggcagcaggccggttattctgcctccgccgtcggttatttatggtcgctcggcgtcgtcgccgaagtggtgattttcgccttgagtaaaaaagtgttccgtcggtttagcgcccgcgacctgctgctgctctcggcggtgtgcggggtggcgcgctggacgattatgggctggacgaccgcgctgccatggctactggtcgcgcagatcctccactgcggaacgtttaccgtctgtcatctggcggccatgcgctatatcgccgcgcggcagggaagtgaggttatccgcctgcaggccgtttactcggcggtggcgatgggcggcagcatcgcggtgatgacggtgtttgctggtttcctctaccagcacctgcatcagggcgtcttctgggtgatggcgctggtggcgctaccggcgctgatcgtgcgaccgaaggcggtgagcgcctaatcctcaagcattttgcaaatctgctgccgctggtgatcgctaaaattctcttcagcatgaaacagcggcggcgaaaacagcggtagcgcggtggtgtaaggcgtgaccactaaggtcacatccttcggcgcgccttgttgctgaaactgagtcacgcttaagtatttaatattcagcggcagcagcgttaattcccgcaattgcatttccagcgcctgttccagttcgcaattttcccgcgtcagcagcactacctgcttttcatgcaggtcggctttttgcatcaaccacgcgccgaaaatcaccgcgattaagctgacctcttcctgattaaattgaatatgataggccgtttcgaaatcgcgtaatgcctcctgggtggtacgcatcaggcgcggatacaggcgttcgatctcctccggtaaagcgttatcaataccgatggcgaatacgctgcggttcaacgcctgcgaaagatggatatagagctggtcactcaacccttgttcatcgctgaatggccgtcccgccagatcctggaaacgatggatcaagcgggagatcgccagatgcaggcgtctgtcctgttgatgaccgtcgtgaatgggatccggggttttcagtaacataaacagcagggtcaggaaaagttgttcgccggcgtggggcgtggcgctgacccgccgctgccagtggcggacgatttcggcggcgaggttaaattccgccgcggcctgcgcccagttgcgctgctcacgggtgaaatccggcgactggcccagatgatgttgtagcaggcagtactgaagatacaggcgcaggaactgaccgtcccggcagtcgaactgccgattgagcgcgcgagcgcagcgattcaccagcgcctgaagattggtatcatcatataaggttcgcgcgataccctgctgtttaagctgcgtttttaacgccggggtaaaatggtgatgaacgaaatgcgggcacaggcgtagcccacgccggagagcgtgcagcaggcacaggcgttgatcgagcgcggcgccttcaatccgatagctgccgtccatctgcgacgcgagagtcagtcgatgataacgctgaatttcgcgccccgtctccgcgatatcctgttgggccgtcgcctcatccacctggttgagcctgaccagctgttgcggcgtgacggattgtcccggaagatagaacatcaggagcacctggctacggcgctgtggactggaaagcgcagatggtggttcaatcactgtcatcatctggtaagttccagttagggtttcagctaagaatagccaaaggatgcagggtgagcagggcgggccgcggcctttagatcaggattgctggcgaagttcacagaatttttcacgcgaggaacagatgaagaaagtgaaacactgcgtcggtgcggcatttttcatggttttatcattgtcagccgttgcgcatccgcacagcttcattaatttgcagagtgaagccgtggtgaaagacggtctgttgaccggctttaagatgcgctggacgatggacgaaataacttcagcggatctgctctatgatgccggcaatgcaaaggcgggcagcgaagtatggaaaaaactggcggcggaggtcatggccaacgtactcggccagcactacttcagcgaactgtggcataacggccagcgggttaagtttgctaaccgcccggatggctacggccttgcgcgtagcgggctgcaggcggtactcaccttcaccttgccgttggcgacaccgcaacctgttgccggacaaacctttactttatccaccttcgatccgacctactacgtcgatatgttttatgagcaggatagcgatttttcgttgcctgccgcgctgcgggcctcctgcaaggccacggtaatgacgccgaaacccaacgacaaaatgttgtcttatgcgcagtcgctcgataaagaggacgcgccgccggaagatatggaactgggtaacaacttcgcccagaaggtaaccttgacatgtcagtagtctttacgccgcgagcgcgggcgccgcgctggaaatcactctggccgctggcgctgtttctgacgctgaccgtcgtgggcggtatctggttgtggctcgcctggccgcaggtactgttgcaaagcgcggtctggcagcgttcactgaatcttgagctcagccaactgctgcaggcggtggcggataatccgtcagcggcggggctgtcactgctcgggttcagttttgtctacggcgtactgcacgcgcttggccccggtcacggaaaaatcgtgataaccacctggcttgccacccatccctcaaagctgaaatcgagtattacgctaacgctggcggcatcgctgttgcagggaatggtggcgatagtactcgtggtggtggtattgacgctgctgcagcttccggcgcgtcaactgcatctcagcagcttctggctggagaaggggagctatctgctggtcggcgcattggggcttttactgtgctggcgggcattgaaaaaactgcgagtcttgctgcggcggccaacgtttaccgcttttaccccgcatcacgtccatgatgaacattgcagctgcggccatcagcaccttccggcgccggatcaactacagagtggcgacgactggcgcgccaggctggcgattgtactgtcgatgggcatgcgtccctgctcgggagcgattatggtgctgctgttcagcaaggtaatcggcgtctttggctggggcatggctgccgcgctggtgatggcggcgggaacgtcgctgaccataagcgggctggcgctgttggtgcatggattccgccagttggctatccgcctgagtcgtcatcaggcgccggcgatgtggaaacaggttggctgggcgacgctggcgctggccggcggcgtggcgctattgacggcggctgtcgtgatgtggagtagcgcgatcccgccgggcggcggcttgcggccgttttagggtataaaaaaaggaagccgcggcttcctttttacattcagtgagaaattaacgcttcagcgcttcgctcaactgctcgcgcatgttcgccagcatcgctttcacgacgcgcgggttaccggctacgatgttgccggtcagcatatagttatgaccaccggtgaagtcgcaaacgatggcgcctgcttcacgagcgatcagttcaccagcggcgaaatcccacggtttgagggcgatttcaaagtaaccgtcaacgcggccagcggcaacgtaggccagatccagcgcggcggaaccggtgcgacggaagtcagcgcactcggtgaacatgttgccgaggatgttcatgtaagcggtagcgtgctgcttcgctttgaacgggaaaccggtggcgatgatagtaccgtcgagatcgcgagcgttgctgccgcgcagacggtagccgttcagctgcgcgccctggccgcgggtggcggtgaacagttcattacgcattggatcgtaaaccaccgcgacttcagtacggcctttaatgcgtacggcgatggaaacagagaagtgtggcagacgtttaacgaagttggtggtgccatccagtggatcgataacccattgaatatcctgatcttcaccagcgtgctcgccgctttcttcggtgatgatggtgtgctgtgggtaagacttgcgaatggtttcgataataatcgcttctgcggctttatcgacgttagtcacaaagtcattgctgcctttctggctggtttctacggaatctggcgtttcgtagtgcttggcaattaaattacccgccttgcgcgctgcgcgcacggcaatgttcagcatcggatgcatcggtatctctcactggatgttaaagaacgggaaaaaacggcgcatatagtaacagcgaattctgcttatgtctccgttttatgttagcatgcacgaataatctttagccgaagaaccataatgctgcaaaatattcgaatcgtactggtagaaacctcacacaccggcaatatgggctccgttgcccgcgcgatgaaaaccatgggcttaactaacctgtggctggtcaacccgctggtgaaacctgattcccaggccatcgcgctggccgctggcgccagcgatgtgattggcaacgcgcagatcgtcgataccctcgatgaagcgctggcgggctgtagcctggtggttggcaccagcgcgcgctcccgcacgctgccgtggccgatgctggatccgcgcgaatgcggtctgaaaagcgtcgccgaaggccaacatgcgccggtcgcgctggtctttggccgcgagcgcgttggcctgactaacgacgaactgcagaaatgccactatcacgtggcgatcgccgccaaccccgagtacagctcgctgaacctggcaatggcggtgcaggttatcgcctatgaagtgcgaatggcctggctggcgactcaggagcaggcgcagccggcggttgaacatgaagaaacgccatatccgctggtcgatgatttagaacgtttctacggccaccttgagcagacgctgctggcgaccggttttatccgcccgaatcatccggggcaggtgatgaacaagctgcgtcgtctgttcacccgcgcgcgtccggaaagccaggagctgaacatcctgcgcgggatgctggcgtctattgagcagcagaataaaggtaagtaagcgcgttaacgccggagggcgcttcgcttatccggcctacgaatctgttgtcgcccgggcgaggcctttggccgaccccgggagcggctcgaaatcaataacggcacggaaagccaaatacctgactaaaacagtcaagtaaatagttgaccaatttactcgggaatgtcagacttggccctgctatgcaatacccatattaataaaaagcccgggcaggggcgagtttgaggttaagtaagacatgagactgacatctaaagggcgttatgccgtgaccgcaatgcttgacgttgcgctcaactctgaaacgggtccggttccgttggcagatatttcagagcgtcagggaatttcgctttcctatctggaacagctgttctctcgcctgcgtaaaaatggtctggtatccagcgttcgtggaccaggcggcggttacctgttaggtaaagaagctggcagcatcgccgtaggcgaagtgatcagcgccgtagacgaatccgttgacgccacccgttgtcagggtaaaggcggctgccagggtggcgataagtgtctgacccacgcgctgtggcgcgatctgagcgaacgtttgaccggtttcctcaacaacatcaccctgggcgaactggtgaataaccaggaaatcctcgatgtttctggtcgtcagcacaatcatgaatctcagcgtactacgcgttctcaggacgccattgacgtaaaactgcgcgcctagcacgaggcttagtttcagcttgcggcttacgggctgcaaggtgaaacggcagggtagatagcaataataaagattttcagaatcaggccgggatgttgagacatctcgtgtactcggtcgtacatcaagccggttgcctggttccttgcattgagtgatgtacggagtttaagagcaatgaaattaccgatttacctcgattactccgcaacaacgccggtggacccgcgtgttgccgagaaaatgatgcagttcctgaccctggacgggacctttggtaacccggcctcacgttctcaccgtttcggttggcaggctgaagaggcggtagatatcgcccgtaatcagattgccgaactggtcggcgccgatccgcgcgaaatcgtctttacctccggcgcaacggaatccgataacctggcgattaaaggtgcagccaacttttatcagaaaaaaggcaagcacatcatcaccagcaaaaccgagcataaagcggtgctggatacctgccgtcagctcgagcgcgaaggttttgaagtgacctaccttgctccgcagagcaacggtattatcgatctgaaagagctggaagcggcgatgcgtgacgacaccatcctggtttccatcatgcacgtgaacaacgaaatcggcgtggtgcaggatatcgctaccatcggcgagatgtgccgcgcccgcggtatcatttaccacgttgacgccacccagagcgtgggcaaactgcctatcgatctgagccagctgaaagttgacctgatgtccttctccggtcacaaaatttatggcccgaaaggtatcggcgcgctgtacgtacgccgtaagccgcgtatccgcatcgaagcgcagatgcacggcggcggtcacgagcgcggcatgcgttctggcaccctgcctgtccaccagatcgtcggaatgggcgaagcttaccgtatcgccaaagaagagatggaaagcgaaatggcgcgcctgcgcggcctgcgtgaccgtctgtggaacggcgtgaaagatatggaagaagtctatctgaatggcgaccttgagcagggcgcgccgaacattcttaacgtcagcttcaactatgttgaaggcgagtcgctgattatggcgctgaaagacctggcggtttcctccggttcagcctgtacttccgcgagccttgagccatcctacgtgctgcgcgcgttaggcatgactgatgaactggcgcacagttctattcgtttctctttaggtcgtttcactaccgaagaagagattgactacaccatcaatctggttcgtaactccatcggccgtctgcgcgacctttctccactgtgggaaatgttcaaacagggcgtggatctgaacagcattgaatggtcacatcactaattcggcaccgataaggagaattcaacatggcatacagcgaaaaagtcatcgatcattacgaaaacccgcgcaacgtcggctccttcgacaacagcgacgacagcgtcggtagcggtatggttggcgcgccggcgtgcggcgacgtcatgaagttgcagattaaagtcaacaatgaaggtatcattgaagacgcgcgcttcaagacctatggctgcggttccgctatcgcttccagctccctggtcaccgagtgggtgaaaggtaaatcgctggacgaagcgcaggctatcaagaacaccgatatcgccgatgaactggaactgccgccggtgaaaattcactgctctatcctggcggaagacgcgattaaagccgcgattgcggattacaaaagcaaacgtgaagcaaaataattaagagttgaggtttgttatgtcgattaccttaagcgacagtgcagcagcgcgagtcaattccttcctggcgaaccgcggtaaaggctttggcctgcgtctgggggtaagaacctccggctgttcaggtatggcttatgtactggaatttgttgacgagccggcggcagaagacaccgtgtttgaagacaaaggcgtgaaagtcgtgatcgacggtaagagcctgcaattcctcgacggcactcaactggacttcgtcaaagaaggccttaacgaagggttcaaatttactaacccgaacgtgaaagatgagtgcggttgcggcgaaagctttaacgtataatcggtaatccccaaccccaccgcggtcacgccgcgcgtggggttttcgtttagatgcatgaccctgaggttactatggactatttcaccctcttcgggttaccagccagctataccctctcgctcgaacaactggctgtccggtatcaggatctgcagcgccagtaccatccggataaatttgccagcgcgcccgctgcggaacagctggctgcggttcagcactccgccaccattaaccaggcctggcagactctgcgtcatccgctgacccgtgcggaatatctcctttcgctgcacggctttgacctcgccagcgagcagcacaccgtccgcgacaccgcgttcctgatggagcagctggaactgcgcgaagagctcgatgaaatcggccaggcgaaagacgaagcgcggctggaagcttttatcaaacgggtaaaagcgctgtttgatacccgccatcaactgatggttgaacaattgcaaaacgagacctgggatgcggcggctgatactgtacgcaagctccgttttctcgataaactgcgcagcagtgctgaagaactcgaagaaaaactgctcgatttttaattttcggaagcaattatggccctattacaaattagtgagcctggtctgagcgccgcgccgcatcagcgtcgattggcggcaggtatcgaccttggcaccaccaattctctggttgctaccgtgcgtagcggccaggccgaaactctgcccgatcatcaaggccgctacctgctgccgtcggtcgtgaactaccacgcctcagggctgaccgtcggctatgaagcccggctcaatgccgctcaggatccggtgaacaccatcagctcggtgaagcgaatgatggggcgttccctcgccgatattcaaacccgctatccgcatctgccgtatcagctgcaggccagcgaaaatggactgccgatgctccagaccgccggcggcttgctgaacccggtgcgggtctccgccgatatcctcaaagcgctggctgcccgggcgaccgaagcgttggcgggcgatctcgacggcgtggtcattaccgttccggcctatttcgatgatgctcagcgtcagggaaccaaagacgcggcgcgtctggcgggcctgcacgtgctgcgtctgctcaatgagccaaccgcggcggctatcgcctacggcctcgattccggccaggaaggggtgattgcggtttacgatctcggcggcggtacctttgatatctccattctgcgcttaagccgcggggtgtttgaagtgctggcgaccggcggcgattccgctctcggcggcgatgatttcgaccatctgctggccgactatctgcgcgagcaggcgggtctccgcgaccgtagcgataaccgcctgcagcgtgagctgctggatgccgccattgcggcgaaaatcgccttgagcgatgccgacgtggcgcacgttgaggtcggcggctggcagggcgatatcagccgtagccagtttaacgatctgattgccccactggtaaaacgtactctgatggcctgccgtcgcgcgctgaaagacgccggcgttgaagcgcaagaagtgctggaagtggtgatggttggcggctccacccgcgtgccgttggtgcgtgagcgcgttggcgaattctttggccgtaccccgctgacctctatcgacccggacaaagtcgtcgccattggcgcggcgattcaggcggatattctggtcggcaacaaaccggacagcgaactgctgctgcttgatgttatcccgctatcgctagggctggaaaccatgggcggcctggtagagaaagtgatcccgcgtaataccaccattccggtggcccgggcgcaggagtttaccactttcaaagatggccaaacggcgatgtctattcacgtgatgcagggcgaacgtgagctggtgcaggattgccgctccctggcgcgttttgcgctgcgcggtatcccggcgctgccggcgggcggggcgcatattcgcgtgaccttccaggttgatgccgacggtctgctgagcgtcacggcgatggagaaatcgaccggcgtggaagcctcaatccaggtgaaaccgtcttacggcctgaccgacggcgaaatcgccaacatgattaaagattcgatgagctacgccgaacaggatattcaggcgcgtatgctggctgaacagaaagtcgaagccgctcgcgtactggagagcctggaaagcgcgctggccgccgacgccgcgctgttaagcgccgcagagcgtcaggttatcgatgccgccgcggagcaggttcgcaccgccgcggcaggcgaagatgctgacgcgattaaagaagccattaaaaatatcgacacacaaacccaggaattcgccgcacgccgcatggaccagtcggtccgcgctgcgctgaaaggccaatccgtggacgaggtttaaaatgccaaaaattgtttttctgccccaccaggacctgtgcccggatggcgtagttgtggaagctgagagcggtgaaaccattctggatgcggcgctgcgtagcggtatcgagattgaacacgcctgtgagaaatcctgtgcctgcaccacctgccactgcatcgtgcgtgaaggttttgactcgctggcggaaagtagcgaagatgaagacgacatgctggataaagcctgggggctggaacctgacagccgtctgagctgccaggcgcgcgtcaccgacgaagatctggtcgttgagatcccgcgttacaccatcaaccacgcacgcgagcactaatatggcactgaaatggaccgacagccgcgaaatcggcgaagccttgtatgacgcttacccggatctcgacccgaaaaccgttcgcttcaccgatatgcatcagtggatttgcgacctggaagagttcgatgacgacccaaacgcatccaatgaaaaaattctggaggcgattctgctagtctggttagacgaagccgaataattttcgcctcaagcggaaaaattttaacgggctgccatagggtggcccgtttgctaataaggataaagataatgaccgaagccatgaagattacgctttctactctgcctgccgatgcgcgctggggagaaaaagcgacctggagtatcaataacgacggtatcgccttacatctcaacggtaaagacgacctggggttaatccagcgcgcggcgcgcaaaattgacggcatggggatcaagcacgtcgccctgagcggcgaaggctggaacaccgatcgcgcctgggccttttgggccggctataaagggccgaaaggtcagcgccaggtcgaatggccaaccctggacgacgcgcagcgcagcgagctggataaccgtctgacgatcatcgattgggttcgcgacaccatcaacgcgccggcagaagagctggggccagaacagctggcgcagcgcgccgtcgatctgctgtgcggcgtggcgggcgaaaaggtcagctatcgcatcaccaaaggcgaagatctgcgcgagcagaactatcttggcctgcataccgttggccgcggctccgagcgcccgccggtcctgctggcgctggactacaacccgaccggagataaagacgcgccggtatacgcctgtctggtcggcaaaggcatcaccttcgactccggcggctacagcatcaagcaaagcgcctttatggattcgatgaaatctgacatgggcggtgcggccaccgtgacgggcgcgctggctttcgccattacccgcggtctgaacaaacgtgtgaagctgttcctgtgctgcgcggataacctgattagcggcaacgctttcaagcttggcgatatcattcattaccgcaacggtaaaaccgttgaaatcatgaacaccgacgccgaaggtcgcctggtgctggcggatggcctgatcgacgcctcggcgcagaagccgcagctgatcatcgatgccgccaccctgaccggtgcggcgaaaacggcgttgggtaacgactaccacgcgctgtttagctttgacgacgcgctggcgaatcgtctgctggcgagcgcgcaggcggaaaatgaggccttctggcgtctgccgctggccgaattccaccgcaaccagctgccgtctaacttcgctgaactgaacaacaccggtagcgcggcgtatccggccggcgccagcaccgcggcgggattcctgtcccacttcgtggaaaactaccaccagggctggctgcatatcgactgctctgcgacttaccgtaaagctgcggttgaacagtggtcggcgggtgcgactggccttggcgtgcgcactatcgctaatctgctaacggctgagtaatggccttgccgggtggcgctacgcttacccggccaggaaaaccgtaagcccgcgcggacgggcgatttttgaagtagcgaatctatgtctgatactaaaaatgaattagaaactctgctggagaaggcggcgaccgagcctgcccatcgtccggcatttttcaccgcgctgcttgaggccaccgtgtgggtgccgggtagcgcggcggacggcgagcagattgtcgaagatagcgccctcgatctacagcattgggaaaaagaagacggcacgtcggttattccgttctttacctcgctggaggcgctgcagcaggcggtagaagacgaacaggctttcgtgatgatgcccgcccgcacgctgatggcgatgacgctgggcgaatcgctgttcctcaacccgaagctgccgagcggcaaagaatttaccccgcgggaaatcagccatctgctgggtgaagagggcagtccgctcagtacccagacggtactggaaggcggtgaagcgctgctgctgtctgaagtcgccgaaccgccggcgcagatggtggattcgctgaccacgctgttcaaaacgctgaagaccgtcaagcgggcgtttctgtgctcgattaaagagagcgccgacgcgccggctaacttgttgatcgggattgaagcggaaggagatattgaatccattatccaaaccaccggcagcgtggccaccgataccttgccaggcgatgaacctatcgatatttgccaggtggtagaaggcgagaagggcatcagccactttatgattgcccatattacgccgttctatgaaaaacgttggggcagcttcctgcgcgatttcaaacagaaccggattatttaaagcctgccgggtagggcgcagccactacccggatattttacctttactgcgccggctcgatcggcaaatccgttctcgcgccccattcactccacgagccatcgtacaggcacacgccgttgacgccgagggtggtcaacgccagtaccactactgccgccgttaccccggaaccgcagctggcgataatcggtcgggcaaaatcaacgccctgacgcttaaagatatcgttcatctcatcaacggttttcagttcgccattaatcaccagctcggtccacgggacgttaagcgcgccggggatatgcccgcggcgtaagcctggacgcggttcatccgccagcccgttaaaacgcgccgccggacgggcatcaacgatctgcgccgatccttcgtggctgaccagcagcacatcggttaagcgtttgatcacctccggatcgaagttcacctcaaattcgccttccggcaggtcgggttcgcctttctccagcggcaattcatcacggcgccagccttcgaggccgccggcgacaatcgacaccttttcgacgccgaaggtacgtagcatccaccaggcgcgcggcgctgagaacagattgccttcatcataaaccaccaggtgcttatcgctgttgacgccaagctcgcgcatcgccacggcgaaggtttccgcacgcggcatcatatgcggcagcgggctggtgtggtcagacagcgcttcgatatcaaaaaaaaccgcgccggggatatgcccgtcgcggtattccgccgccatatcgcgcagcgcttcctgacccgccggcgccatccgcgcatcaagaatttgaatctgcgggtcatcaatatgttccgccagccagtcggccgcaacaaagaatgaggtggacatgagtgcctccgttttattatcgatcaatgaattgtcggcgttttataaagggctgacaagttaaggtcgcgggagtggggaggcggtcacgcacttttctgattcatcggtggtttctatgctggtagctgttgagaatcgccgcgatgacgcataatagaacgttattgattgcatcaggctctgggccgaggggttagaaggatgaaaccatttcgtttagcggcgctatcgttagcgctccttaccgcgatctcattaagcggctgcgataacagcggtgaaccacaggccgtatcggcggccgataaaggcgccgccgatagcgcgaaaaagccggatagcgcgcagctggcgacgttaaaagaaaaaagccagggcaaggctttgacgttgctcgacgcttctgaagtgcagctagatggcgcagcgacgctggtgctgaccttctccattccgctcaaaccggatcaggatttctcccacagcgtgcatctggtcgataagaaaagcggcaaggttgacggcgcgtgggagctggcgccgaatctcaaagagctgcgtctgcgccacctcgagccaaagcgtgaattgatcgtcaccgttgacccaacgctcattgccctcaatgacgccaccctcggcagcccttttgaaaaaaacatcgctactcgcgatatcgcgccgagcgtcggtttcgccagccgcggttcgctgctgccggggaaagtggtcgccgggctgccagtgatggcgctgaacgtcgacaatgtcgatgttaattttttccgtatcaagccggaatcactctcggccttcgtcagtcagtgggaataccgtaactcgttaagcaattgggaatctgacgaactgttgaagatggccgatctggtttacagcgggcgcttcgatctcaacccggcgcgtaatacccgtgaaaagctgctgctgccgcttaacgacatcaagccgcttcagcagccgggcgtctatgtggcggtgatgaatccggccggtcattacagctacagtaatgcggcaacgctgttcaccctcagcgatatcggcgtctcggcgcatcgctaccacaaccggctcgatgtcttcacccagagcctcgaaaatggcgccgcgcagtcggatattgaagtgcaactgctaaacgccaaagggcagacgctggcgcaggcgaaaagcgatagccagggccatgttactctgcaaaccgataaagaagcggcgctgctgctggcgcgtaaagacgggcagacgacgctgcttgaccttaaactgccggcgctggatctggcggaattctccatcgctggcgcccctggcttcagtaaacagttctttatgtttggcccgcgcgatctctatcgcccgggggaaacggttatccttaacgcgctgttgcgcgacggcgatggtaaaccgctggcggagcagccggtgaagctggaagtggtgcagccggatggccaggtgattcgctctgtgatgagcaaaccggtcaatggcctgtatcagtttacttatccgctcgacagcggcgcggccaccggcatgtggcgtattcgcgccagcaccggcgataatcaaccccgcgagtgggatttccacgtcgaagactttatgcccgaacgcatggcgctgaatctgacgccgcaggccgcgcctatcgccccggatgacgacgtcgcctttagcgtcagcggcgcttatctctacggcgcgccggccagcggcaatcagctgcagggcaaactgttcctgcgtccgctacgcgatgccgtcgctgcgctgccgggcttccagttcggcgatatcgcggaagaaaacctctcccgtagcctcgatgaagtccaactgacgctggatgaaaaaggccatggcgaagtgaccaccgcgagccagtggcaggatagccattcgccgctgcaggtcgtgttgcaggccagcctgctggaatccggcggccgtccggtgacccgtaccgtacagcagccgatctggcctgccgaggcgctgccggggatccgtccgcaatttacgctgaaggacgtttacgactaccgcaccgataccacggtgaaacagccggtagtcgatgaaaacagtaacgccgcgtttgacatcgtctatgccgatgccaaaggcgagaaaaaagcggtctccggtctgcaggtgcggctgatccgcgagcggcgcgactactactggaactggtccgatagcgaaggctggcagtcgcagttcgatcaaaaagatctgcaggagggcgaggagtcgctggatttgcaggccgggcagataggtaaagtgagtttcccggtagagtggggctcgtatcgcctggaggtgaaagggccggatgacgttgtcagcagcgtgcgcttctgggcgggctatagctggcaggataatagcgaaggcgccggcgcggcgcgtcctgatcgcgtaacgatgaagctcgacaaacctggctataaaccgggcgacaccatcaagctgcatattgccgccccggcggcgggtaaaggctacgcgatggtcgaatccagcgaagggccgctgtggtggcaggaaattgacgtcccggcggagggcatggatctgtctattccggtggataaagcctggaatcgccacgatctctacctcagcacgctggtggttcgccccggcgataaatcgcgatcggcgacgccgaaacgcgcggtcggcctgctgcatctgccgctgggcgatgaaaaccgccgtctgtctttggcgctggaagcgccggagaaaatgcgcccgaatcagccgttgacggtgaaagtgaaggccagcgttaaagagggcgaggtgccgaaacaggttaacgttctgctctcggcggtggatagcggggtgctgaatattaccgattacgctacgccggatccgtggaacgcgttcttcggccagaaacgttacggcgcggatatttatgacatctacggtcaggtgatcgaagggcaagggcgattagccagtctgcgcttcggcggcgatggcgacgagttaaaacgcggcggcaaaccgccggttaatcacgtgacgatcgtcgctcagcaggcgcagccggtagagttggacgatcggggtgaaggctcggtgacattacccatcggcgattttaacggcgagctgcgggtgatggcgcaggcatggacggcagatgacttcggcagcagcgaagataaagtggtggtagccgccccggttatcgcggaactaaataccccgcgtttcctcgccagcggcgacgccacgcgtctggcgctggatctcagcaatctgaccgacaaaccgcaaaccctgcaggtacatcttaccgccagcgggttggtcacgttgaccgagggccaactgccgccggtacaactggcgccgggcgcccgcagcacgctgtttataccggtgaccgcgttagcgggattcggcgatggtcaggtcaatgccaccatcagtggcctgagcctgccgggcgaaaccttcgcgccgctgcaaaaacagtggaaaatcggcgtgcgtccggcattcccggcccagaccgtcaatagcggcgcggtgctacaacctggcgaaagctggcaggcgccggcggcgcagagtcaggggttcgccccgcaaacgctgcagggccaactgctgctcagcggtaaaccgccgttgaatctcgcccgctatattcgcgagctgaaagcctatccttatggctgccttgagcagaccgccagcggcctgttcccttctctgtacaccagcgcggcgcagctaaaagcgctgggcatcagcggcgatagcgatgagaaacgccgcgcggcggtcgatgttggtatctcgcgcctgctgcagatgcagctggaaaatggcggctttgcgctatgggataaagccggcccggaagaatactggttgaccgcctacgccatggacttcctcgtccgcgcgggtgagcagggctatagcgtgccggtcaacgcgattaataagggcaacgagcgcctgctgcgctatctacaggaaccgggtttgatgaccgtgcgctacagcgacgatgcccaggccagccgttttgccgctcaggcatatgccgcgctggtgctggcgcgccagcaaaaagcgccgctcggcgccttgcgtgaaatctggagccgtcacgaacaggcgcgttctggattgccgctgctgcaactcggtattgcgctgaaaaccatgggggatgcgccgcgcggcgcagaggccatgaagctggcggttaccacgccgcgccaggatgagaatcgctggctgggcgattacggcagccaacttcgcgatgatgcgctgaagctggcgctgctggaagagaataagctgctgccagaggtgcaaaaccagctgttgagcagcttgtcggaagaggccttcggtcagcgctggctgtcgacgcaggaaaccaacgcgctgttccttgccgggcgtacgcttgccgacctgccgggcaactggcaggcgcaaacctcgctgcaggcggagccgcttgccagcgacaaagcgcaaacccgcaatctcgacggcgatcggctggcggcgctgcaggtgacgaataccggcaatcagccgctgtggctgcgcctcgatagcagcggttatccgcaaagcgcgccacagccgggcggcaacgtgttggggattgaacgtgctattttcgatacccacggtcagcagaaatcgctgacttcgctgcgcagcggcgaactggtgctggtcaagctggaggtgaccgccaaacgtaacgttcctgacgcgctggtggtcgatctgctgccggcgggacttgagctggaaaaccagaacctggctaatagcagcgccagcctgcaggagaatggcgaagcggtacaaaacctgcttaaccagatgcagcaggcggatattcagcatatcgagttccgcgatgaccgctttgtcgccgccgtcgccatcaatgaaggtcagccggtgacgctggtctatctggcgcgggcggtgacgccgggcacctatcaggttccgcaaccgcaggtggagtcgatgtatgtaccgcagtggcgggcgaccggaacggccagcggcccgcttaccgttacgccgtaaatgcgcgcattacctcgcataaaacgccgctggcgctggctggcggcgtttatttttctgctgtggttagcggtgctgctggccgatcgtctgtggccgctgccgctgcatgaagtcacccccgcccgcgtggtggtagcggaagacggcacgccgctctggcgctttgccgatgcgcagggcgtctggcgttatccggtcaccatcgccgacgtttcgccgcgctatctgcaggcgctcattcagtatgaagaccgctggttctggaaacatccgggggtcaatcccttcgcggtgctgcgtgccgcctggcaggatctcacttccgggcgggtgatttctggcggcagcacgctcaccatgcaggtcgcgcgtctgctcgaccctcatccgcgcaccttcggtggcaagctacgccagctatggcgggcgctgcagctggagtggcatctgtcaaaaagcgaaattcttaccctgtatctgaaccgcgcgccgtttggcggcaccctgcaggggatcggcgcggctagctgggcttatcttggtaaaccgcccgctcagcttagctacggcgaggcggcgctactggccgtgctgccgcaggcgccgagccgtttacgcccggaccgctggccgcagcgggcgcaggcggctcgcgataaggtgctggagaggatgctcagccagggcgtctggccgcaacgagcggtacaggaagcgatggaagagccggtgtggctttttccgcggcagatgccgcagctggcgccgctgtttgcgcgccgggtgctggcgacaagcggtgatgaaaaggtgacgacaacgctcgatgccgggctccagcggcagcttgaagatctggcgatgaactggaaatcacgtctgccgccgcgcagctcactggcgattgtcgtcgtcgatcacaccgatatgaaagtccgcggctgggtgggatcggcggatatccgcgatgatagccgcttcggccacattgatatggtctcggcggtgcgctcgccggggtcggtgctgaaaccctttatctacgcgatggcgatggatgacgggctgattcacccggcatcgctattacaggatgtgccacggcgctttagcgattatcgtccaggtaatttcgacagcgggtttcatggcccggtgagcgccagcgaggctctggtgcgttcgttgaatctcccggcggtgcaggtgctcgaagcctatggaccaaaacgctttgcggctaatttacgcaatgccgggctccctctgatgctacccgccggcgccgaaccgaatctgtcgctgatcctcggcggcgccggagcgaggctggaagatattgtcgcggcatatggcgccttcgcccgccatggcaaggcggcgcggctgcgcatgaagcccgacgacccgctggtggaaagggcgctaatgtcgccaggcgcggcgtggatcacccggcggatattggcaggcgaagcccagccattacccgatgcgtcgctgccgcaggcggtgccgctggcgtggaaaaccggtaccagctacggttatcgcgatgcgtgggcggtaggcctcaacgcgcgttatttgattggcatctggaccggacggccagacggtacgccggtggtggggcagtttggttttgccagcgccgtgccgctgttaaaccaggtcaataatatgctgctggcgcgtccgttaatgagccgcggcgggctgccggtcgacccgcgtccgcagtcggtgagccgcggcactgtctgctggcccggcgggcaggatctgccggttggcgatagtaactgccgcaggcgtttagccagctggcttctggacgccagccagccgccgacgctgctgctaccgggtcaggagggcgtgcgcggtatccgcttcccggtctggcgtaacgcagcaggagaaagggtcgccgcggattgtccgggcgcgacagaaacttctgttgatgtctggccgctgccgctggaaccctggctgccggttagcgagcgccgccgggcgcggctgggtacggcatcgaaggcgtgtccgccgctgcagactcaggatgccgcgccgctggtgctttccggcatccgcgaaggcgcagtgataaaacgactgccgggcgaggcgcgggtgatgttacccgtacaaacgagcggtggggaagggcgacgctggtggtttattaacggcgaaccattagaggcaacaggcgtaagaacgacaattacgctagataaacccggcgagtggcaactggtggtaatggatgaggcagggcaaacggcggccgctaatttcaccctacaataaacagggtaaatctgttgttggcggtttgtgttgctaatactcatcttattttaacaaaatgttaccttcatccgtaggcatcgccgacgttgctcattataatgcgcgccaggccatacgatcgtatgtgcaacaacagaacatttaattagaggtaatcatggctattgaacgtactttttccatcatcaaaccaaacgcggtggcaaaaaacgttattggcagcatcttttctcgctttgaagctgcagggttcaaaatcgtcggcaccaaaatgctgcatctgaccgttgagcaggctcgcggtttctatgctgagcacgaaggtcgtccgttctttgacggtctggttgagttcatgacctccggcccgatcgtggtttccgtactggaaggcgaaaacgcggttcagcgtcaccgtgacctgctgggcgccaccaacccggacaacgccctggccggtaccctgcgcgctgactacgctgacagcttcaccgagaacggcacccacggttccgactctgtagaatccgctgctcgcgaaatcgcgttcttctttgctgaaggcgaggtttgcccgcgcactcgctaatctcctgcgtctttcacgccaccgctttgttggcttcattcgcgcaccccggtcacatagttatctatgctcccggggatttgcgaactcgccgcctcgcggtgacctgaaatactttggagatacgcccctcgtcttttcgaccgtcgcggcgttggcctgacaatcgaaaagccttagaggattaagtacgcagttacagatttttttatcattgctttgtgcaaacgtggcaatgatgcgccagaatttgtagaatatagcgcccccggacgagcagtcgctctccggggcgtttctttttcaacccacctggggccataacgtgtaataacgaggccggaaaaattatgtctgaacaaattgtcacacctgataccgccgctctgacggtgccgaataaagatgccaaaatcaacctgctggatttaaaccgtcagcagatgcgcgagtttttcaaaaacatgggcgagaagcctttccgcgccgatcaggtgatgaaatggatgtatcactactgctgcgatgactttgatgaaatgaccgacatcaacaaagtcctgcgcggcaaactgaaggaagtcgccgagatccgtgcgccggaagtcgttgaagagcagcgctccagcgacggcaccattaagtgggcgattgccgttggcgatcagcgcgttgaaacggtatacatcccggaagaagaccgcgccacgctgtgcgtctcttcacaggttggctgtgcgctggaatgtaaattctgctccaccgctcagcaaggcttcaaccgtaacctgcgcgtttccgaaattattggccaggtctggcgcgcggcgaaaatcgtcggcgcggtgaagactaccggcgtgcgtccaattaccaacgtggtaatgatgggcatgggcgagccgctgctgaacctcaacaacgtcgttccggcgatggaaatcatgctggatgacttcggttttggtctctccaaacgccgcgtgaccttgtctacctccggcgtggtgccggcgctggataaactcggcgacatgatcgacgttgcgctggcgatttctctgcacgcgccgaacgacaccatccgcgacgaaattgtaccgattaacaaaaagtacaatattgagaccttcctgaactcggtgcgcggctatatttcgaagtccaacgccaaccagggtcgtgtgactatcgagtacgtcatgctggatcacgtcaacgacggtaccgagcacgcccatgaactggcggcgctgctgaaagatacgccgtgcaagatcaacctgatcccatggaatccgttcccgggcgcgccgtacggccgtagttctaacagccgtatcgatcgtttctccaaagtgctgatggaatatggtttcaccaccatcgtgcgtaaaacccgcggcgacgatatcgatgctgcctgcggccagctggcgggcgacgtaatcgaccgtaccaaacgtacgctgcgtaagcgtatgcagggcgaagcgatcgacgtgaaagccgtctgataagttatgcagcgcacagctttcgctgcgcgctgcataaatatgtcgaattgccaggcgaaatacgctgattcggttaataattacggtgcgtttttgtcgactttgaggcagtatgtagcggtacaacaaccgcttagcattcaatattgataagtctctgtgatagtcgcccggacagccttatactgtcggttgacgttgagcagtgtctcgcggcgcaggctctttcccgcgctgaactttaaatttcacgtaccagtagttgtagcgaatgaatactgaagccactcaagaccatcaagaagcaaactctacgggcgcgcgcctgcgtaacgcccgcgaacaactcggactcagccagcaagcggtggctgaacgcttatgcctgaaggtttccacggttcgtgatattgaagaagataaggcgccagccgatctcgcttcgaccttcctgcgtggctatatccgttcctacgctcgcctcgtacatattccggaagaagaactgctgccgatgatggcgaagcaagcgccgattcgcgccgccaaagtggcgccgatgcagagcttctcgctgggtaaacgtcgcaaaaaacgcgacggttggctgatgagctttacctggctgattttgtttgtggttatcggcctgagcggcgcatggtggtggcaagaccacaaagcgcagcaggaagagatcaccagcatggccgatcaatccaccagcgatctgaacagtagcgatagcggcagccagtcaattccgctggataccagctcggcgaataacgcgccggatacgacggcagccaatgccaatagcgcgccggtcgatacctccaccgcacctgcgccaagcgcgccagcggcgacctccgcgccggtggataacaacgccgtggtcgctccttcgcaggctaacgttgataccgccgccgccgcgccggctgcgccagccccgacctccgcattgccgaccgatcaggcgaatgccgcgacgacggcttccgctcaggatctggtgatgaactttagcgccgattgctggctggaagtgagcgatgcgaccggtaagaaactgttcagcggcctgcagcgtaaaggcgggaacctgaacctgagcggtcaggcgccgtataagctgaaaatcggcgccccggctgcggtacaaattcagtatctgggcaaaccagtcgatttgagtcgttttatcagaactaaccaggttgcgcgtctgacccttaatgccgaacaatcaccggcgcagtaacagacgggtaacgcgggagatttttcatgcataaccaggctccaattcaacgtagaaagtccaaacgcatttacgttggtaatgtgccgattggcgatggggctcccatcgccgtacagtcgatgaccaatactcgcaccaccgatgtggccgcgacggtaaatcaaatcaaagcgctggagcgcgtaggcgcggacatcgtccgcgtttccgtcccgacgatggacgcagcggaagctttcaagctcatcaaacagcaggtcaacgtcccgctggtcgccgatatccactttgactaccgtatcgcgctgaaagtcgcggaatatggcgttgattgcctgcgcatcaaccctggcaacattggtaacgaagagcgtatccgcatggttgtggactgcgcgcgcgacaaaaacattcctatccgcatcggcgtcaacgccggttcgctggaaaaagatctgcaggaaaaatacggcgagccgacgccgcaggcgctgttagagtccgccatgcgtcacgtcgatcatctcgatcgtttgaacttcgatcagttcaaagttagcgtaaaagcctcagatgtcttcctcgctgttgaatcctatcgtctgttggcgaagcagatcgatcaaccgctgcatctcgggatcactgaagccggcggcgcgcgtagcggcgcggtaaaatccgcgatcggtttaggtctgctgctgtctgaagggatcggcgataccctgcgcgtgtcgctggccgccgacccggtggaagagatcaaagttggcttcgatatcctgaagtcgctgcgcatccgttctcgcggtattaactttatcgcttgcccgacctgctcgcgtcaggagtttgacgtcatcggtacggtgaacgcgctggagcagcgtctggaagatatcatcactccgatggatgtttcgatcatcggctgtgtggttaacggccctggcgaagcgctggtttccactctcggcgtcactggcggcaacaagaaaagcggcctgtacgaggacggcgttcgcaaagaccgactggacaacaacgacatgatcgaccagctggaagcgcgtatccgtgcgaaagccaccatgctggatgaagcgcgtcgtattgaagttcagcaggttgaagcaaaataacgtgttgggaagcaatacgcttcccgtgtatgattgaacctgcgggcgcaaggcgccggggttcatttttatatataaagagaataaacgtggcaaagaacattcaagccatccgtggcatgaacgattatctgccgggcgaaaccgctctctggcagcgcattgaaggctcactgaagcaggtgctcggtagctacggttacagcgaaattcgtttgccgattgtagagcagaccccgttattcaaacgcgcgatcggcgaagtgaccgacgtggttgaaaaagagatgtataccttcgaagaccgcaatggcgatagcctgacgctgcgtccggaaggaacggcgggctgcgtacgtgccggcatcgaacatggtctgctgtacaatcaagaacagcgtctgtggtacgtggggccgatgttccgccacgagcgtccgcagaaagggcgctaccgtcagttccatcagattggcgcggaagtctttggcctgcagggcccggatatcgacgctgagcttatcatgttgaccgcgcgctggtggcgcgagctgggcatttccgatcatgtcagccttgagctgaactccatcggttcgctggaggcgcgtgccgcctatcgcgacgcgctggttgcctatctggaacaatttaaagataagcttgatgaagactgcaaacgccgcatgtataccaatccgctgcgcgtgctggactctaaaaatccggaagtgcaggcgctgctgaacgatgcgccggcgctgggcgattatctggatgacgagtccaaagaacacttcgccggtctgtgcgcgctgctcgacgccgctggaattcgctataccgtcaaccagcgcctggtgcgcgggctcgactattacaatcgcaccgtatttgagtgggtcacgaccagcctcggttcgcagggtaccgtctgcgccggcggccgttatgacggtctggtagagcagcttggcggacgcgcaacgccgggcgttggctttgcgatgggcctggaacgtcttgttttactggttcaggcagtcaatccggaatttaaagccgatcctgttgtcgatatatacttggtagcctccggtaccgatactcagtccgcagcaatgcgtctggctgagcaggttcgcgatgcgctgcccggcgttaagctgatgactaaccacggcggcggtaactttaagaagcagttcgcccgcgctgacaagtggggcgcgcgcgtcgcgctggtggtcggtgagtcagaaattgctgacggaaacgtggtagtgaaggatttacgctcaggtgagcaaactaccgtaacgcaggatagcgttgccgcgcatttgcgcacacttctgggttaatttcccggaaactattagtcaggagaaggactgcgtggaaactttcaacaacgaaaacgagcaggtcgacgccctcaagcgtttctttgccgagaacggtaaagcgctggccgtcggggtgattttagggatcggcgcgctggttggctggcgctactggacttcccatcagctggattcggcccgggattcctctctggcctatgagaatgccatttccgcactgaagtcagattcgcctgaaaccctgaccgcagcggagaaattcgccgccgacagcaaaaacacctatggcgcgttcgcatcgctggagctcgcgcagcgtctggtcgataaaaacgatctgcagggcgcggagaagcagctgcaacaagggctggcggccgcctctgacgataacctgaaatcggttatcaatatgcgtctggcccgcgtacagctgcagcttaagcagccggatgcggcgctgaaaaccctggaaggcattaaaggcgaaggctggaccgctatcgttgccgatttgcgcggtgaaattctgctgagcaaaggcgacaagcagggtgcccgcgcggcctgggaatcaggcgtgaaaagcgatgcatcgccagcgctcagcgaaatgatgcgtatgaaaataaataatttgtccatctgagagggactcgatgcaattgcgtaaattacttttgccagggctgctttccgtcaccttactgagcggttgctcgctgtttaacagcgaagaagatgtggtgaaaatgtcaccgctgccgacggtggaaaaccagtttacgccgtccacgtcctggagcacttcagttggcgatggtatcggtgatttctattccaacctgcacccggcctttgccgacggcgttgtgtatgcggctgaccgtaaaggcaccgtgaaagcgctgcacgctgaagacggtaaagaagtctggtcggtgaacctggcggaaaaagacggctggttctcgcgcgccccggcgctgctctccggcgggctgaccgtttccggcggccacgtttatgttggtactgaaaaggcgcagctgttcgcgctgaataccagcgacggtaccgtcgcgtggcagagccgtgtggcgggtgaagcgatttctcgtccggtcgttagcgatggcatggtactggtgcataccagcaacggtcagctgcaggcgctgaacgaaaccgacggcgcggtaaaatggaccgtgaacctggacatgcctgcgctctccctgcgcggtgagtccgctccggccaccgcttatggcgcggcgattgtcggcggtgacaacggtcgcgtcagcgccgtgctgatgcagcaggggcagatgatttggcagcagcgtatttctacggccaccggcccgactgaaatcgaccgtctgaacgacgttgacaccacgccggttatcgttaatggcgttgtttatacgttggcttataatggcaacctgaccgcgctggatctgcgcagcggccagattatctggaagcgcgaactgggttctgtgaacgatttcatcgttgacggcgaccgtatctatctggtcgatcagaatgaccgtctgctggcgctgaccaccgatggcggcgtaacgctgtggacccagagcgatctgctgcaccgtctgctgacttctccggcgctgtataacggcagcctggtggtaggcgacagcgaaggttacatgcactggattaatccggaagacggccactttgtggcgcagcagaaagtcgatagctccggtttcctgaccgacccggttatcgccgacggtcgcctgcttatccaggccaaagacggtacgctgtattcgatcacgcgttaactcgcgcggtagtatcgctttaataaacggctcctgacagacaggggccgttttgactttttaaaaaacctcgtaaaatgaggttgtattgcaatttgtatgaggcatttaacatgatacctgtggtcgcgcttgtcgggcgccctaacgttggaaaatccacgctcttcaaccgcttaacgcgcactcgtgacgcgttggtcgcggatttcccggggctgactcgcgaccgtaagtacggtcgtgctgaagtggaaggccgcgaatttatctgtatcgataccggcggtatcgacggtacggaagaaggcgtggaaacccggatggcggaacagtctctgctggcgattgaagaggccgacgtggtgctgtttatggttgatgcgcgcgcgggcctgatgccggcggattccgcgatcgccaaacatctgcgttctcgagaaaaaccgaccttcctggtggcgaacaaaaccgacggcatcgacgtcgatcaggcgatggccgacttctggtcgctggggctgggcgatatttatccgatcgccgcttcgcatggtcgcggtgttaccagcctgctggaacacgtgctgctaccgtgggtagatgaggttaatccgcaggaagaagtggatgaagacgccgcctactgggcgcagtttgaagccgagcaaaacggcgaagaagttgaagaaccggaagacgacttcaacccgcaagatctgccgattaagctggcgatcgtcggccgcccgaacgtcggtaagtcaacgctgactaaccgcattctcggcgaagaccgtgtggtggtctacgatatgccaggcactacccgcgacagtatctacatcccgatgcagcgcgatgaacgcgaatacgtgctgatcgataccgccggcgtgcgtaagcgcggcaaaattaccgatgtcgtggagaaattctcagtcatcaagacgctgcaggcgattgaagacgccaacgtggtgatgctggtcattgatgcccgtgaaggtatctccgatcaggatctgtcgctgctgggctttatccttaacagcggtcgttccctggttatcgtggtcaacaaatgggatggcctgagccaggaagtgagagagcaggtgaaagaaaccctcgacttccgtctgggcttcatcgacttcgcccgcgtgcactttatctccgctctgcacggcagcggcgtcggcaacctgttcgaatcggtgcgcgaagcttacgacagcgccacccgtcgcgtgggtaccgccatgctgacccgcattatgaccatggcagcagaagaccatcagccgccgctggtacgcggtcgccgcgtgaagctgaagtatgcgcacgccggcggttataacccgccgatcgtggtgattcacggcaaccaggtgaaagacctgcctgattcctataagcgttacctgatgaactacttccgtaaatccctggatgtcatgggtacgccgatccgtattcagttcaaggaaggggaaaacccgtttgccaataaacgcaataccctgacgccgaaccagatgcgtaagcgtaagcgcttgattaagcatatcaagaaaagtaaataatgcagaaacccgccgctggcgggttttttttatctaccctattcaacgcttcgcgggtcagcaacgctgacgtatgacgtgataaactcatgctattcattatgagaaggaggcaccatggaactcaattgcccgatttgccatgcccggttggaaacgcaaggcaacggcgcgcattgcgcgcactgtgagaaagagtttgctgtagaggcccgctgcccggactgccatcagccgctggaagtactgaaggcctgcggcgcggtggactatttctgccagcacggccacgggctgatctcgaaaaaacgcgtcgaatttgtgcctgtctaatcgctaacgcagccttcaccgttacgccagagttcaaccagcgcctgcggcgcgcgctcttccgggatgagaatgatcaggctgtgatagcgccgggcgctgattatttggatgcgaaagaaacgctggtcgccgctacctggagaatccggctgccccggcggcttgccgagcggcaatgactgctgcagtattgcggcgatgcgctgtttttgctgttcgttaagctgcgccacgacaatcttacgcatgccgctcagcgtcgggatccaagcgacgccaccttcgcgggccagctcaataatcgcgtcatcgctgaggtctgcctcgttcatgatgtgactccaacatcctcccaggcctttcgaatcgcctcggcggtctctttaccaaaacgtttttcgccatgatgaatcgtcagtttggcaaaggccgggaaatcggcgtcttttgccagcgatttatcacaaaccgcgtcataccaggcatatcccgctttttcccatgcaaaaccacccagcgcgatggcggcgagatagaaagcatgattaggaatgccggagttaatatgcacgccgccgttatcctgctgggtatgcacaaaatctttcatgtgggcgggttgtgggtctttgccaagaatagggtcatcataggcggttcccgggtgcgacatcgaacgcagaccttggccgtgaatacctttcgcaagtagcccctcgccaattatccagtctgctttatctgccgtttgctggcgctgatattgtttgaccagcgagccaaaaacatcggaaagcgattcattgagcgccccggattgttcgaaatagataagcccggcttcgctctccgtaacgccatggcttaactcgtgcgccaccacatcaatagcaatagtaaaacgattaaagatctcgccatcaccgtcgccaaacaccatttgttgcccgttccagaaggcattttgatattcgtgaccatagtggacgctgccggtcagcttcaatccgcggttgtccagcgaatcacgatgatagctcttccagaaaaaatcatgggtgatgccgagataatcataggcctcatcgacggcgacatcgccgttggaaggctgtccttcaaaacgcacctggatccctggaagttcctgagtctgcctggcatcataaatgtctcgctcaagctggcctggcgtggcgacatgggcggcggcggggcggcctggcacatgcgccatgagggtttgtacatggctcagcgtttgctgcgcgcagcgctgttgctgagctgagccatgatcgacaatgcggcgtaaaatgtaggggggaatcacgaaacgaggacgagtatctggcatatcacgctccctggccggatgaacggttttaaaagggcatgacagcagtatagttatccccgcatgaaacgggaggataattagacttttttgcgggcgcgcgttttcttcaccggagtgatgactgtcacttcgctttcgacccaaccatcttccagccgggtagtcacgacatcgccagcctgtacctgtttgatttttttcaatactttgccatcgccggctgaggtgacgctgtagccgcgagccagcgtcgccagcgggctgacggcctccagatgcgtcacggtattgccgaaacgctcgcgctgctcgctcaggcgggcgcgaatattttccgccagacgatactccagttgctgaatacgcgactgcgcgcgatggatgcgcggctgcgggttttgctgattcaaccgctgcacggcgcgctgctgacgctggtcggcacgtttgagctggctttccagcgcaaagcgcatccgctgacgcaggcgctccagttcggtctgctgacgcgctaagcgcagctgaggatgttgctgctgtaaacggtgaaacagctgagtaaagcggcgatggcggttggcgaggaagtaatccatcgccatctccaggcgttgctggccggactgtagctgacgcaacagttcctgctgattgcggctgacgatctctgccgccgcagaaggcgtcggcgcacgcaggtcggcgacgaaatcggcgatagtgacgtcagtttcatggccgacggcgctcactaccggaatgcggctggcgaaaattgcccgcgcgacccgttcgtcgttaaagctccataaatcttccagcgaaccgccgccgcgcccgacgatcagcacatcgcattcctggcgctggttggctaatgctattgcgcgcacgatttgccccggcgcatcatcgccttgcaccgccgtcgggtagataatcaccggcagcgagggatcgcggcgtttcaacacatgtaagatatcatgcagcgcggcgccggttttggaggtgacgacgccgacgcagtgcgcgggagaggggagcgcctgcttgtggctttgatcgaataacccttctgccgtcaggagcgccttgagctgctcatatttttgctgcaacaggccctcaccggcgggctgcatgctttcgacgatgatctggtagtcgccgcgaggctcgtaaagggtaatgttggcgcgaaccagcacctgctggccatgctgcgggcgaaatgtgacgcgacggttgctgttgcgaaacatcgcgcagcgcacctgagcgttatcgtcttttaaggtgaagtaccagtggccggaagagggctggctgaagttagagatctcgccgcttatccatacctggcccatttcgcgttccagcagtaagcgaaccgtctgattcaggcggctgaccgtaaatattgcaggggattgagatggcaacatgtgagcaagatcaaattctaaatcagcaggttattcagtcgatagtaacgcgctgagaggggatcgcaagtattatttgcaaaaaagggtggatgcaatcggttacgctctgtataatgccacggcaatatttatccaccctggtcgagatattgcccatgctacgtatcgctaaagaagccctgacgtttgacgacgtcctccttgttcccgctcattctaccgttctgccgaataccgccgatctcagcacgcagctgacgaaaacgattcgtctgaatattcctatgctctccgcggcgatggataccgtaactgaagcgcgcctggcaattgccctggcccaggaaggcggcatcggctttattcataaaaacatgtcaatcgagcgccaggctgaagaagtccgccgcgtgaagaaacatgaatccggcgtggtaagcgatccacagaccgttctgccgactaccaccctgcgcgaagtgaaagaactgaccgaacgtaacggtttcgccggttatccggtagtgaccgaagacaacgaactggtcggcattatcaccggccgcgacgtgcgttttgttaccgacctgaatcagccggtcagcgtttatatgacgccgaaagagcgcctggtcaccgtgcgtgaaggtgaaagccgtgaagtggtcttcgcgaaaatgcacgaaaaacgcgtagaaaaagcgctggtagtggatgatagcttccacttgcgcggcatgatcaccgtaaaagatttccagaaagcggaacgtaaaccgaatgcgtgtaaagacgagcacggtcgtctgcgcgttggcgcagccgttggcgctggcgccggtaacgaagagcgcgttgacgcgctggttgccgcaggcgttgacgttctgctgatcgactcctctcacggtcactccgaaggcgttctgcagcgtattcgcgaaacgcgcgctaaatatcctgacctgcaaatcatcggcggtaacgtggcgaccggcgcgggtgctcgtgccctggcggaagctggcgtcagcgcggtgaaagtgggtatcggcccaggctccatctgtactacccgtatcgttaccggcgtaggcgttccgcagatcaccgccgtttccgacgcggttgaagcgctggaaggcaccggtattccggttatcgccgatggcggtatccgtttctccggcgatatcgcaaaagcgattgccgcaggcgctgccgcggtgatggttggctccatgctggccggtaccgaagaatccccgggtgaaatcgagctctatcagggccgttcttacaaatcctaccgcggtatgggttccctgggcgcgatgtccaaaggttcctccgaccgttacttccagagcgataacgccgctgacaaactggtaccggaaggtatcgaaggccgcgttgcctataaaggccgcctgaaagagatcattcaccagcagatgggcggcctgcgctcctgtatgggtctgaccggttgtggtactattgacgcactgcgtaccaaagcagagttcgtgcgcatcagcggcgcgggcatccaggagagccacgttcacgacgtgacgatcaccaaggaatccccgaactaccgcatgggctcctgattttcatcgcccggctacgcgccgggcgatttttattcaatcatcgctacttctctggaattaacgtcaatgacggataacattcataaacatcgcattcttatcctggacttcggttctcagtacacccagctggttgcgcgtcgcgtacgtgaattaggggtctattgcgagctctgggcttgggacgtgaccgaagctcaaatccgcgagttcaacccgaacggcattattctttccggcggcccggaaagcaccaccgaagacaacagcccgcgtgcgccgcagtacgtcttcgaagccggcgtaccggtattcggcgtatgctatggcatgcagaccatggccatgcagctgggcggccacgttgaagcttccaacgagcgcgagttcggttacgcgcaggtggaagtgcagaccgacagcgcgctgattaagggcatcgaagatgcgctgagcgctgacggtaagccgctgctggacgtgtggatgagccatggtgataaagtcaccgctatcccttccgactttgtgaccgtcgccagcactgaaagctgcccgttcgccatcatgggcgaatgaagaaaaacgcttctacggcgtacagttccacccggaagtcacccacacccgtcaggggctgcgtatgctggagcgctttgtgcgcgatatctgccagtgtgaagcgctgtggacgccggcgaagatcatcgacgacgcagttgagcgtattcgtcagcaggtgggtgaagataaagtcatcctcggcctgtccggcggcgttgactcttccgttaccgcgatgctgctgcaccgcgccatcggcaaaaacctgacctgcgtattcgtggataacggcctgctgcgcctgaacgaagccgagcaggttatggatatgttcggcgaccgtttcggcctgaacatcgtgcacgttgcggcggaagatcgcttcctgaccgcgctgaagggcgaaaacgatccggaagcgaagcgtaaaatcattggccgtgtcttcgttgaagtgtttgacgaagaagcgctgaagctggaagacgtgaaatggctggcgcagggcactatctaccctgacgtgatcgaatccgccgcttccgcgaccggtaaagcgcacgtcatcaagtctcaccacaacgtgggcggcctgccgaaagagatgaagatgggcctcgttgaaccgctgaaagagctgttcaaagacgaagtgcgtaagattggcctggagctgggcctgccgtacgacatgctgttccgccacccgttcccggggccgggccttggcgttcgcgtactcggcgaagtgaagaaagagtactgcgacctgctgcgtcgcgcggacgctatcttcattgaagaactgcgcaaagccgacctgtatgacaaagtaagccaggcatttaccgtgttcctgccggttcgctccgtcggcgtgatgggcgatggccgtaaatacgactgggtcgtctccctgcgtgcggtagaaaccatcgactttatgaccgcgcactgggcgcacctgccgtatgatttcctcggccgtgtttccaaccgcatcatcaacgaagttaacggtatttcccgcgtggtgtacgacatcagcggtaagccgccagcgactattgagtgggaatgatttacagctagttcatagctaatcatttctattcattatctaaattaaccctctgtttttacagagggtttttatttatatctactcataactattcactctacaccacattttttgacggtacgcgtgacggtattaccctaaaggtatactctcataccgtcaaagcatggatgaaaaaatgggtgaacagtgcttaccgataccaaattaaaaaacctcaagccgaaagagaaactctataaagttacagatcgtgatggactgtatgtagccgtgctcacgtcaggcagcatctcgttccgctacgactatcgaatcaatgggcgccgggaaacgcttgtcattggtcagtatggccgtgacggtatatcgcttgccgaagccaggcaagaattggttgatgcaaaaatactcctgaagtcaggagtatcgcctgctgcagcaaagcgtgacggtattaagcaactacgtggtcaggaaacttttgcggtacataccgacagttatatgaagcatgtcgttctcgccgacagtacgcgcgatatgaagcaggccgttatcgacagggatattcttcctgctctgggtaacaagctgatgggtgagatcagcaccaggatggtgagggatctgtgcgacaggatagtcgaacgtggcgggcgggcgacagcagtacaggcaagagagattatcagcagcgtttatcgctatgccaacgaccgcgggcatggttttttcaacccggctgcggatataaagccaagcgctattgccacattcaagccgcgtgatcgttgcctgaagcctgaagaaattggcgtgctgttccgcgcacttgataccgtcagcacattgccaacgctcaagctggcggtaaagctaattcttatcaccatggtgaggaaaggtgaattcactctggccacctggggtgaggttaatttcgcaaaatcgacgtggactattcccgccggcagaatgaaggcgagccgtgagcatgttatctatttgccgtcacaggctcaggatctgatggttggcctgcagatgtgtgctggtggaagtgattacctgttgcctggaagatacagcaccagtaagccgctttctaatgcggcgctgaattcagttatcgatcgggcggtggcggcagctacagatgctggtgaaagcatacagcctctcaccgttcacgaccttcgccgcacggccagcaccctgctgcatgaggcaggattcccgtctgactggatagagaaggcattggcgcatgagcagaagggcgtccgtgcagtgtacaaccgtgctgagtattcgcggcagcgcgcgtacatgctgcagcagtgggctgatatgattgatgcatggataagcggggagcattacgacctggtgccgttctccccgtctgcgtttgaaaaatggatggatgggaagtaaagccgccggctggcggctatacgaatacgtcaatcggatctccgtgagataaggccgcctcgtttgcttcgcgtctcatactcagaaatgcgccaaccggatcccagctatttagtatggtgtccagtgcatttctgctgtgacatgtcacaaggcgttcttttaacttaacagcacagccgcgaatgtttgcgcgagtcgggccagccattttcatgcacaggcataatgtgattagcatgtccgcgtattcatcggcggctgcattgagcaccgccggatctattcgtttctttaatgcattgatttggtgcttggtgctcatcagttaacctcattaaatgcggtgcacgttagtctgtcatcgtgaagtttgtggcagtacggacattcccttagatgctcgtatgcatggttcaatacaatgacggactggtgaggtagcagcgctgtacctttcgccagcagctcacgaagaaaagtaaccattgcgtttgctgaatcacgctgctctcggtagcgctctgcatctctctgcaggcgaaggatttcaccattgcgctgattgataacggcgcgggcctcttcaagctggcggatcatggatggctcatcgtagatattcatgctgcctccgtattcactaccggtattgcgcagcctggcagcagttcaatcgccggcgccgcgcactgattcccccacacatcgaaaccgtgcgatgactggcgggcgaaaagctcaatgcgtgagacatcgcccagcagttgcaccagtttctcccgtattacgtcaggcttgcgggagttctccaggcgcggcgccgtgacgtgctgacagatagaggcatccatgcgcgccggcagtttcccacgtaccgcaaacaggcaatcttcactgttcgcccgggtcatatggcccatgccgatcgcactgttacctttgtgcttgttcgtcttgtgccaggtgaatcccttcatggtcataagcttgaatccccacgcttcaacaactttcagcgcctcaaccggctgagtgggcacccaccacatcgccagcagacaatcgtcggcggcgagctcccaaaccggcaacctgcagatatccagtacattcatcaccgggtatttgaacccggcgccgcggttgccgtctgcggctttatcgcggtatacccaaggcggatccgcataaatcagagtgtacttagtcataaaccaccccgcggcaacctatcccgttgtattctccacggcgcaacttcatacttttggtaatgcactgctcgcggcggatggcgatccttgctctttccacttcagtttgcgcgacatcgaggcattcaagccaaagtcgtgatgcgagtcgaaactgcccgcgctcttcgcgtgagatggcgcgccgttctatttccagagctgccggcgattcggcgactaccttcaatgatctgcgcggcgcgtagccgagatggtacttctgcaatctggttaatttgctcatcttatccagccttttacgaatatgaccgccagcagaaatagccaggcggatacagcggccaggtaccagtaccaccctgaccacttttcccaatggcgcgctatcgccttcatgccgcggaactcaccgggcgataaactctctgatcaaccggtggcttttttcctgtgtatacctcagggctattggcctttctttcatcaagccatttttcaacttcttcctgagtccatgcacagcgacggtcggtgatataccaacgcttagggaattcgcctgcagcctccaggcggtcaatcgtgctccatgacagtggcaccaccgccaggagttccttcttacctaaagcacctttcataaaaacctctctttgatacaggtgcggcgcgcgtggcgccgcggtggtggttacatcggaatttcgttaagttcgtcgcgtcggatggtgtacacgtccgttgctttcgccaggcgctcatcatcattggctaggtttttggcaacgtatttgtatgccttatccagatcagcaatggtgttgtagttcattgctgcatcattgaatgctgtcagcatttcatctggatcacggtcatctgctttgcgctgtcgatcttcctggctttgctctggcttcgtgttgatcagtttgttcatgcctgacgcagttgctggtgctggagtaatgtcacgctcaacgcgcggctgcgattcctgcaactcatccggtgtgtagacgccaaggagaacatcaggggcatgcagacgggcccagcgcttaacgcacaggtaagccagttgctggcgcgggtcctgttcccacaggggggaattacggacgccggcctgagccatgctaatggtcaattcacgcggttctgactctcctttgagaattgccgaaacagtgacggttagtgatggtgacttatcgctctttccgtttaccttcgaccagtcgccatcccaacggtaattcaggcgggtggcaagcaggttggaagacgaaacaacggcgttaaccagttgcgcttcatagcccagcgtgccgtttacaacatgcgttttctgcgctaccgcgaacgggttcattccccactgcgccgcctgcattgttaccgccaggcagtcagcaggttttcctgcaaggtgctgcggaacggttgccttgctgtccgccatcagagttgcaaagcgaacaagacgatccatgccttcagggctgaaaatagccgcggcggttccgacggtagcgcctggctgagaggtgattgcgatatcgttgctcatacgtacatatcctgtttgcgtgcccactcagggcgtttaataatttccacgccaccccattcatctgaaaggcgacactggtgataggtattcagatcccggcggaacagcgccatgccagcatcaacatctggtgcgtcaagttcgaaaacgcgtaccgggtatcgaccgcagtcgatcgtttcgcttactgccaggaagaagaatccgtgtggttcaccagttactttctgcgcaccttcccggtacatggcatcctgaacgtggtaacgaaactcctcgatgtggcgggcgaagcggtccatatcagccactttcttcacgtcgacaatcacgttgtgctcgttgagccacttatcaggacggattcggcacaactcgccggtctcatcgtcgttccagtacatcgatgtttcgcagaaacctggcgcttcaagcatccatcgcgccgccgggtgagccatggcgctttcgcgcataagtttcagtttcctgccttgttcggcgtccatcaccgtcattcccttgtcagcaacatctttcatgaacgcttcttcgtcagctttcccctggttagtccggcggttgaattgcggcgccacgatgaaacgcttgtcgaattcttccggctcaagcagcaggcagtgcagggcggtacccatatccagcgcagattttttctcttcatcctccggcgccgcttttacccatttcagcagggcagggttttttgcaaccatatccagttgcgacttactcacgccgtcaccggcgtggtaatcctcgttgctgatatcgtgataaatgcctggtttcattgctttactccgatcttcccacacaggcatctgatagcttcaccatgcgattttcctatcaggtcaaaatgtgatggtctgatttttatccatccacggcgttcgagctcaagagcaaaccagtgaactgttgttctccgaattcctaacatagctgcaatctgcgaatagctaaatgttcccattgttagtaattggtatagagttggtttcatgccgccgtcctcgcgctgtcgatctggtctgctacatcccatttgccaacgataccggtcagttcgctgatgaatgccgccagtgattcttcaaactccacgctttctaccgcggcattgatgatttcctgacggacgccagcgcggcgcagattgtcgaatgccggaagcaggtattcagttttcagagtttcctgcagttcaacctggcgttcgtgaagcatctcggcgacgcggtagtcgcgatcaaaaccagccatgattttttgcaggttgcgttgctgttgagttgaaatcatttgctcacccccatatccatttcagtcctggccgccagcttgttaacgaatgcccagctaatggcctctgtcagcgtgcgaagcttccagctcatcagcccgcatgccgtaacgcagtaccaaccgttgatgatcttccactgcataatttgttacctcggtctgttaccgatgaggtaataattatccgtatgtgatttgaagtcaatagatatgaacgtaaaaaattacccgtcgggtaataattcaggcatgaaaaaagccgctcaatggcggcttacttgttgtttattatgggattattgatgaggcttttcgtgcttaacaatcacgaaatcaatgtagttttcgatcgccatcttgtcggactcaggtaacaatttgtacctggctcggtcataatcgatggctgccgggtcatctggtggcagcaaaagctcgtaggcatggcgcccgaacggctcagccagcgccgccaggttggtgatggatatgctggcctcgttgttgaggaacctgttaattgtagactgactgacgccagattcttccgccaggcgctgttgcgatgacaggtttcggttctcgctcatccagcgtttaaggttccaagatgccagcttgccaatctctccgaagtcgacatcctgcacctcttcatgtactggcatgaatttatcgatgtcgagccagttggtcggcttgttagcggccttctcaattttacgtgcagccacgtcgccaattatctttttgccgcttgcccaacggttaatcagatttggctgggtctccatccgctccgccaggcgagactgaattccgttgaattcacggtagatcagctctttcaggttttcgcgccggatatcgtggatgcttttcatgtcagtaaaatttttctcatatgtgaatcatttagtgtttcaatttactgcctttttacctctcgggtaaatgcacccctgcggtaacaaacattgatttttgtaaccttttggggggaaatattcttatttggaaataaatatcagggcattagttaggagcgagaacacggcaagttcgattttaaaaaaacactggcctgcggctgagcccggatgagcgtgaagcgttcgcagaagaggccggaacaaccagccattacatccagactcacctgaccggtaagcgcaagatgcccaggtaaggcattgatgaatgggctatttaaggcatgcaaatcccgcgaatgggttaaatcaaagcctgagctggcttacttcttctactcctgatccccaaaaaattcccctttaggccgccttctggcggtcttttcatatctattcgtaacttcaaggtaataatgatccgaatatggttgatcttttttcggtcatcgcacaaaatcatcgtaaccataaccagaatatgaggtgaagtgtggagattatcactcgtcttgacgctgcaaagtcaggtcttaagcgttattacactggtaaacaatgcaagcatggccatgacagcgagcgttgggtttacaacgggcattgcgtggaatgcacgatggagacgaaccgccggcgccaggctgagattaaacggattattgattaattcctccccacaacattcaagctgatagcggagattaatcatgagcagacatgcaacagattgggcctgggagacagatccaggcagctcatcattaaagctcatactgctctcgatggctgacagagccgatgaatataacctctgctaccccagcatagaacgcctcgttaaagacacttgcctgaataaaaaaaccgtgcaggccgggcttatatcgctcatgaaaatggggcttatttcagataccggagagagaaagggagcgacgaaaagagtgcgggttttctctcttaatataaccaaaaacgggaacattaaaggcaaccgggaagggagtaatgaacccgaaaacggaaatgttaccgaaaacgggaatatacccaaaaacgggatgttgaatgatccaaaaaacgggatgttgaatgatcccaaaaacgggatgttgaatgatcccaaaaacgggatccagaaccagtcatataaccagtcatttaaccaagagagggggagcaggacaaaaaccggggattctgtgcctcatgaccccggcgcaaacaacgccgtgatgaataactttgttcctcctggtgggccagggcaattaggcaaatttgtcatgcatgaacaatggcaaccatcagatgactttcttcggaaaagctcattgcagggaatctacctggacagtctgccaacggcacaggaacttgcagagttcagaatttactggatggctgagggtaaggcataccatcaggcacagtgggagcagaagctggcaaggcggctgcagattagcagacagaagcaatcaacattacctgataacaacgttccgcactggaacagtccagaagcgtgggaggatttcctgtgaacaacgtatttaacgccattcagaaccgagacggtgatgcgttatcccgcctgacagggtcggatcgtcagtatgcaggtagcgacaacgtggtgaacatctcggcagagcgtttagtcgatgctctgtttaaacagcttaaacaactcttcccggcggcagagcagactaacctgaagacacctgcgcaggagacagccgccaaacagcagtggatagcagctttcgctgaaggtgggatacgtacccgcgaacaggtatctgccggtatgcggcatgccagagccagtgagtcacctttctggccgtcacccgggcaattcatcaagtggtgcaaagacagcaagatggtgctgggcgtcagcatcgaggatgtcatgggagagtttcatcgctacgccaaggagaaaagtctccagcctggtggccctgaacaattcccctggcgccatcctgtcatgtactggatagtttgtgatacccggcgtgcgatgtaccagcggcagctgagcgagattgaggtcgagaagcatgcgcgcaaactcctggatgagtgggcgtcgaaggtagctgcaggtcatcagatacccgacccgattctgagcattcaggtgaagccagagccaattcaaacaccagttgatacgggcggtaatgcttaccacccacccggtaaaagtttcggatgcatgccgaatgccgccaccctggggggaatgacaccggcacaatggctgatggaggaatacaggcgagggaaagcggcaggactcatcaggtaacacgaaagcgcggtagcgcatttttttacgcctgaattgttacctgcaaggtaaaaataaatgcgcatagctattgaatataatccgtatatggatttaaattacccaagaggtaaattatgaagaaacaacttcaggcgctcggaaggctcaagtctggccagatgaacaaaaccgaaaccgcctatgcgcaagagcttgaactgcgtaagcgctacggggaaatcgcctggtaccgatttgaaggtatcaagctgcgactggctgacaacacgttctacacgcctgacttcgcagtgatgctggcaggcgggcaaatggaattgcacgaagtgaagggctactggactgatgacgccagggtgaaaaccaaagtcgccgctgatcagtatccgttccggatcatcggggtaacgaagctaccagccaaagccggaggcgggtggaaggttgaagagttctgatttaacgatcttcatagatatcaaatgaatcaataagttaagcgggtaatcgggggtaatcatggactttatgaatcacagcgggcgcactttacgggtgtatgcgctggcgttgaactttctggtgctgatcgcagttgttgtgctttcggcttttggtatctggcttgttaacgaatgggtggcagcatgaataacgaactcacagcagcactgttaactatcgagaagagcaaagaggcaacaggctgcccggctggcgtagacctgcaggactgggtgaagaagctggcggcggagaatgcgtacttgatacctaaagccgctagcgaactgtcaaatgcctgggtgcttcataagtatctaatcggcattcaagcggcgattatgtatctggataatggaaacaagaaggccgcgcaggaatggctgtatggaactattgctggtccgggatttgagttccctgacgaggttgacgatatcgacgcatgggcaactcatcagatgcgcggcagcataagccatccgcgcgcacttgaaataatcaaggaagaaacccccgccaccgatcgcatcgtagccgggattaaggctgatgcgattaccgcttctttggatgcctgctctgactacctcgatacagactgcgttatggacaggcttgatatcagctacgaagaagccgagaagcgaacctcaggggcaatcgagtttcatgatgcgatggtcgattttgcaaaccaggtgcgcgagggggccgacaaatgagcatcgccacttatctcaataccggtttagccattcttggatgggcatacatcatggttaaaacaggccagtggattaccaaaaatgctctgaggcagtgggacaagcgtcgtaaggaatctcgccgccagaaagctgtgaatgagttttatgacgcctttgagcttaacagcctggaacctggctctaccgttcgcctggccactaaaggcgacctgacaatcatgatgttccgcagcgagggaaaggccaatgactgatatcaccgaactggcgcagagagaaaaattcgaggcttggtttaagtcgtcatttcatcccgacaaaaccgggccatacatcaaagaccaactgtatttcgcctggaaagcggctggcgctgagctggtagaggcgctggagaaggcgcagcagcacattgcgcgtcaggagcaaattctcctgaataaggatgagtccctgtctattcgtcgcggtgagcttgaggcggcgcagcaggagcgggagaactggcgtaccagctttgataacgagcggttccgcgctgataagctcaaagcgcatatcgacgatattgaacctattcgtgcagcagccgagaagttagtccgttgcaaaggtcgttatcacagcgagcagaactatcgcgcgttggctgcgctgtttggcgtaaaaaccccagacctgccgccgttggatagcgagtcccgcaccgccaccgctgccgccgctgacgtactggccgagcgtaagcggcaggttacagctgaggggtggacacctggacatgatgatgaatatgaacacggcgaattagccgatgcggccggttgctatgcgctttcctctgaactgttcgattgtgccggtgaaccacccagaccgtggccgtggcctgatgaatggtggaagccaactaatcgccgccgtgacctggttaaggctggagctttaattctggcggaaattgagcgccttgaccgtgccgctggcatcaaggtgggggatgagtagatgaccgtgcatcactctcttcgctgcatgaaatgctacaaaaaatgggagagagcgtggctagcttcggctggctactcccgtgacggatggcgcgatagttcgcttatcaagtggcggaatgtatccgtaattggcgaaaccaaatacggaacacctatttgtaagtgcggtagttgtgggcacgcatacaaatccaacagctcggcagctcgtagggctttgcgctgggctaaagaaaatggcggtttaggagccaaccaatgaccagcaaattaaccataagcagagaccgtcttgctgaaatagcgcaattcggatttagcagcgcaataacgccagcaaacgattttgaaattaaggagctagcccgcatggcgctggccgcaatggacagcgagccggtggcgtggcgttggcgcagtgggccagataaacggtggcatctcgccagtagaggtgacctggcgggagaggttgagccgctctatcgccacgcgcagacagcgtcggaacgtgagcaggtacgccaagagcacgccgagtggtcacaggctaccttcggcaatgtcggaccggtaggcccgctgaagcacctcagcaaagaagcactggaagccgctggacagcccggcgacctgtcagaatgggctgatatgcagttcctgctttgggatgcacaacggcgtgccggtatcactgacgagcagattaccctggcgatgattgataagctggcagtaaacaagcagcgcgaatggccggagccgaaagacggggaaccgcggttgcatatcaaagcgcagccagcgccggtagtgccggaagaagccaccccggacagtatcgagattcttgccagtgccaggcgtcgtgaccacgctgtattccagtgggatgaagaccaacgaaatgcggccgctgattcctggaatgcctgccgcgccgccatgctccagggtgccgatggcaaaccacatttaaccgtctggtatggctcgatgccagaaacgaacggtaaaaccaactggaccgctatgctgcatcgcaaaggacagcacccgtgggaaggcatcacaatcgaccgttcagagtatcctgaccgcgtacgctatgaagctgaccgcatgcgtcacctcattggtgatttggcagatgaaccagatattctggcctatgatgctgacgcgcacagcgggtatgtaccgccagcagtaccgcagtcacctggcagtgaacccgcaaccctgccgggtaaatggattccggtaagcgagcagatgcctgaggcgggtgatgacatgattgtattcacagacggcattgttatgtctggggtttcatacgccaaaaagaaaggtttctatatccaggctcttgaatatgacgatgatgaacctgtcgacggcgtaacccactggatgccgctgccggccggtccgaaggaggtgaagtgatgaattcacgccaacgataccgaatgaaataccctggctggtttgtagaggctgtaaaggatttgctgagccggagaatgctggaagatattgcatatggcgtggtttgcttactgttcctcatcacgttaatcccccgcagaacgcaaatccgtgcagcgcgcgcggcagtccgccgccggcaatcgtaaaattgaactggtgctggatgagcaggagcaggaaatgttggcgcggaactgcgccgcccggcgccctggtcgcgatccctatgaaatggccgagtacatcgcgttgctgatccgccaggatgatgcgcgggtgcgcggtcgtataaagtcaataagtaaacgccgctgtgggaagtgtggtgacgcgctgccggtggcatcatgcccgtgcgctggcgattctgcgtgctgggctacgcttggctggcacgaaacgaaaatacctctgtgacatgtcacgacggattgactaaagcctcacatgattatactgtttaaatatacagtatttttatgtgaggtcatcatgggttttccatctccagccaaagactacgtcgagcgtacactatcccccaatctcctgtgccacattgatggaaattgccgggttatcgaaaccagcgccggatacgccgttatcaataccgccatcaggccaaagcaggggagtaacatcctgatatccctgtgcggcatcatgcagtttgcagtggtgcgcggtaaagcaattatcaccgatgacggcgaagcaattgaaggcgatgcgcttgatgatgtcgatgtgaaaggggtgctgacgttcctggttaatcgtgccgactggcagagagaagatgatattccgatcatgtaacatcctggctggcatgatagtattaccatagcggtaataattacccggagtgttaccatgccaaaggacccgaaacgaaaatcaacgcagttcaagccgctgacagtccagcaggaggcttattgccaggagtatgtgaaatgccctgagaaccagactcaggcggcaattaacgccggatactcaccaaatacagcgggaaagttcgccagccagaacatgcgcgatgcgcgtattcagaaacgaattgctgagctgatggaagaccgcaacaagcgcctgcgcgtcagtgccgattatgtcctgctgcgcctggtggaaatcgaccagatggacgtgctggatatcctgaatgatgatggcgggctgaagcctatccgcgagtggccgaagatatggcgcaccacgctaagtggctttgacctgtcgtcaaccatcatgaacatggatgagaccacgatcgagaccatcctcaagaaaatcaaatggccagataaggtgaagaacctcgagcttatcggtaagcacgttgacgtgatggcgttcaaagagcgcatggaagttaacgtgaacgtcacgattgccgaccgcatggccgccgcacgtaagcgcctgaaagagcacaatggcggtgaccagtgaccaataccgtgcgatccccggaagaacaactgatcgacgatatcgccagtttcacgcacgacccgctgggttatgcgctttatgcgttcccgtggggcgaggatggcacagaactggcgcatgccaccgggccgcgacagtggcaggctgatgcattccgcgagataggcgagcatctgcagaacccggcaacacgtcaccagccgctgatgattgcccgggcctccggtcacggtatcggtaaatccgctttcatatcgatgctgattaactggggaatgtccacctgcgaggattgcaaggtggtggttaccgccaacaccgacaaccagctgcgcacgaagacctggccggaaatcatcaaatggtcaaaccttgccatcaacaaagactggtttacctgtaccgccacagcgatgtacagcaacgatcccggccacgacaaacgctggcgcgctgacgcaatcccatggtctgagcacaacacggaagcgttcgccggcctgcacaacgagcgcaagcgcatcatcgtggtattcgacgaagcatccaacattgccgatctggtgtgggaggtagctgagggtgcgctgacggacgaagatacagaaattatctgggtggcgttcggtaacccgacgcgcaacaccgggcgattccgtgagtgcttccgcaaatacaagcaccgctggaagtgcgcgcagattgattcccgcaccgtggaaggcaccaacaaacagcagttgcagaaatgggtggatgactatggcgaagatagcgacttcgtgaaggtgcgcgtacgcgggatcttccctgacgcgtctgaactgcagtttatccctaccggcctgaccgacgaggctatgaagcgagtcgtcaccgcggcgcaggtggcacatgctccggtgattatcggcgtcgacccggcttattccggcgtggatgacgcggtgatatacctgcgtcaggggctacacagcaaagtgctctggaccggcaataagaccaccgacgatctgattatggcgaagcgtatcgctgactttgaggacgaatacaaagctgacgccgtatttatcgactttggctacggcaccgggctgaagtccatcggcgacggatggggcaggacgtggcaactaatcccgttcggcggtggttccaccgacccgcagatgctcaacaagcgcggcgagatgttcaacgcctgtaagacgtggctgaaactcggcggcgagctggatgaccaggagacggctgatgacctgtcggcggcagagtacaaggtgagggttgacggtaagatcgtcatggagccgaaggaagatatcaaagagcgcctgggccggtctccgggtaaaggtgacgctctgctgctgacgttcgcattcccggtagcgaagaaactgaatgacccgcgacagcagcagggcaaggccatcactgactatgacccgtgggcgtagcaaagctatttctatagcttcgctttttctaatgaaatcaaagggcacaaaaaattcgctgggtgagcctcaagcaaaggcctttactctttaagttattgatttagtttcagacgacatttttgtcctctggatagataaaacaaagaccgctaatgcgggcttgttcgatgaaacaaacagacaaaatagtttctgtccgagctggagaaaaccacgaatatgtggtttttacagctcgttttcgtgtgagaagtgttgctcttgcatattaggtccccgttaatcccattcaggcaatatacactaaacccgcgcatcggcgggctgattgtgacatgtcacggaattacttgatggcattaaagccagcgttaatagcttccgcgatatttaccgcattggttttatcaaatagtccactctgaataagcgccgcatgcaggcattgtaacttcatgttgtataagtgctcactgcggtaatctgcatctgattttgaaagtccattctcgaatgtttcatttattccgccgcccatgttgtaccactgccaacacttaccaaactcacgatttagatcgccatcattcagtgcatcaatcactgataggtcagataccgcatcttcatgctcaggctgatatccttctccgatagcttgtttcaggtattcgatcatctcgccgcgtggctggctaagatcttcaatctctttcatgattatcaccttaaaaaaatgcccggcgaaccgggcgaaatggaagcaatgaatggtgccttccttggctgggtgtcacagggtttacagcatgaagtcatcgtgatggcgtcctgctgtaaaaagggcggtggtcagaaatggaataactgccaccgccaaacttgcactggaactacgggtatcacggtcctgatgcgtgattgggttgtggtggccggtgctgcgatattccggcgtgcttgaccctacatggcctcaatatccaaccggccagctcttagcgcatcagcctgcgcattcaccacaacggaaagagcattcctgccatgtgcactcattcaagtggaatgcataaggtggtgcctgaaatgctcttgcctgttgcatcctcgtctcttccgaggtgtcacaccgaaccgccacaatggtgagttgcaacttcgtgcctaaacgatggcctgcacattcctgctacccgctcgggggtaaagagaccaaggaaccccgccggaccgctaacgacacatgtgccatatgccgtgtatcaacagcatcgctgttaccttaaaggtaataattgcaaccaataaagtcaatatactacgagaaataattcatatgtggttaaattggtaataatttaaacgcgtatggagtatcgatatgtgcattggcagcaagccatcagtacctgcagcaccagaagttcaggcggcaccgcaggaacaggatcaggctgtggtcgattcccgcgatgaagaaacccgccgccgccgcgcagccgccggtcgtagctctacgctgctgactagtgcgcagggtgacacctccaccgccaataccagcggtaaaacgctgctcggtcagtaacaggagcgcgggatatggcggaaaccattaaagagcaattgctgaagcaggtggctttgctcaataacgatcgctcttcgttcgagccgcactggcgcgagctaagcgactttatcaacccgcgcggatcccgattcctggtcactgacgtcaatcgcaatgaccgccgtaatacaaagacagttgacccaacagcgacgctggcaaaccgcacgctatcaagcggcatgatgtcaggcatcacttcgccagcgcgcccctggtttaaactggcaacgcctgatccggacatgatggactatggcccggttaagttgtggcttgaagccgtccagcgccggatgaacgaggtctacaacaaatcgaatttgtaccagtctctgccactgctctacagcagcctcggcacttacagcactggtgcgatggcagttctggaggatgacgaagacgttatccgcaccatgatgttcccaatcggcagttactacctggcgaactctgcgcgcggcagcgtcgatacctgctatcgcaaattcaccatgaccgtgcgtcaactggtgatggaattcggtatgagcaacgtcagcgcctccgtaaaagggctgtgggagtccggctcatatgaaacgtggatcgaagtgattcatgccgtatatcccaacatcgaccgcgataccggaaagctggacagcaaaaacaagcgcgtcaaatccgtttatttcgaagttggcggagataacgacaagctgctgcgtgagtctggtttcgatgaatttccgattatggcgccgcgctgggaagttaacggcgaggacgtttacggctcatcctgccctggcatgatcgctcttggtcaggttaaagctctgcagcttgagcagaagcgcaaaagccagttaatcgacaaggcgactaacccgccgatggttgggccttcttccctcaaatcacagcgcgtctctcttcttcctggagatgtgacgtatctggatgtgatgacaggccaggagggattaaagcctgcctacctggtaaacccgaacaccgctgatctgctcgctgacattcaggatacgcgacagatgattaacagcgcctatttcgtcgacctcttcatgatgctgcagaacatcaacacgcgctctatgccggttgaggcggttatcgagatgaaagaagagaaactactgatgctgggccctgtgcttgagcgtctgaacgatgaatgcctgaacccgcttatcgatcgcacattctccatcatggcgcgcaaaaaccttttaccaccgccgccagatgtacttcagggaatgccactgaagattgaatacatctccgtcatggcgcaggcgcagaaatctattgggctatcaagtctgtcatccaccgttggctttattggccagcttgctcaggtcaaacctgaagcgctcgacaagcttgatacagaccaggccattgacgctttcgctgaaatgtccggcgtatctccaacggtcattgtccctcaagaacaggttaaccagattcgcgaagaacgtgctcagcagcagaagcagcagcaggcaatggcaatgggtatggctgcggcgcaaggcgccaagacgcttagtgaagcgcagaccgcagatcctagcgtgcttactgctatctctggcgccgtcggcgcaccggcaggaggtcagcaatgacagatatcgatgacgaaaaactcagggcggagcgtgaactagaggcgcgcgagcgtgagcagcgcgatatcgacgatatcaagtttgtcatggatagcgagaaaggccgccgcgtcgtctggcagatcctggttgaaggccaggtattcggagcctgcttcagcccagacccatacgttacagcatttaacgaaggtaagcgtaaccatgcgctgtcgctgttccagcgcgtcatggtgcattgccctgatcagtatctgaagatggccgcagaggctaacgaaaaggagtagacgcaatgacgatcaaacgaattctacctatccggctcgacggtaacgcgatcattgctgatgtggaggatagcggtgcgggagattcagttgcatgggctgacattactggcaagccaagcacgtttcctccttcggctgcgaccacctcagctattggtggcgtaaagatggctgccactcaggctaactccaccgcgactgatgcggctggcctggtaactgattttaacgctctgctggccaagctaaaggccgcggggattatggcttaagaggcattagatgaacttattcgaacgtttgatgtatcgccgcctttgcaacgagcagcctgccgacggtggcgctgctccggctgcggcatccgaacctgcaccggcggccggtgataaccctgctggtaaccctgcatcgacagaggcagcttctgacgctccagaaaacggcgccgatccggaaaagccggaggaaagcaaagcgcctgatgatggcaagcaggaagaaaagaaagatgacggcaagcctgagggtgcgccagagaagtatgaattcactgccgccgagggcgtcgacctcgataccgaagcgctgaaagatttcgaaccggtagcgcgcgatctgaacctgaccaatgagcaggcgcagaagttggtcgatgcatacccgaagattctggcaggcgtgcagcagcgccaggctgaagcatggcaggcgcaaactgaagagtgggcggcaactgtgaaggccgataaagaaatcggtggcgacaagttgacggcaaacctcggcgttgcgcagcgcgctctggataccttcggtacgccggagttgaaggaatacctgaacggtaccggtctcggcaaccaccctgaactggtgaaggcgtttatcaaagtaggtaaggccatgtcggaagacggcatggttacaggtaaagaaagcggtcagcgtagtgcggccgaagtgctatatggcaaatgagagaggatataaccatggctgttaaaggcattaatgcgctgacgctggctgactggggtaagcgcatcgacccaaacgggaaggttgataaaatcatcgagcttctctcccagactaacccgatcctgcaggacatgctgatcgttgaaggcaacctgcctaccggtcaccgcaccactgtgcgcaccggcttgccgtctgcaacctggcgcctgctgaactacggcgtgccgcagagtaaatcgaccaccgttcaggttactgatgctactggcatgctggaaacctatgcggaaattgataaatcacttgcagaccttaacgggaatactgctgaattccgcctgtctgaagatcgcgcattcattgaagcgatgaatcagatgatggctcaaactctgttctacggtgataccagcgttaacccacagcagtttatgggcttatcttcgcgttattccgacctgtcggcaactaatgctcagaacattatcgacgccggcggtaccggtaccgataacacctctatctggctggttgtatggggtgaaaacaccgtacacggcatcttcccgaaagggcagaaagccgggatccagatggaagataaaggccagcaaaccctgaaagatgctaacggcggccagtatgaaggctaccgcacccattacaagtgggacaacggcctctgcctgcgtgactggcgctatgtcgtgcgcatcgcgaacatcgatattagcgacctttccgatccggcggccgcggcgaatatctccaagctgatggtaaaagcgctgcaccgcatccctaaccgtggcatgggccgcccggtgttctacatgaaccgtaccgtagcccaggctcttgaccttcagtctctggagaaatcctccctggcgatcagcgtcaaagagaccgaaggcgaatggtggaccagcttccgcggcgtcccgattcgtgaaactgatgcgctgctggaaaccgaagcccgcgtggtttaacccctgactataaccagccgctcgttaccgggcggctctatggagaaacaaagatgatcctcgacaaactgttgatgttctccgaagcgcaggcggttactgccactgctgcttctaccgacgtgattgacctggggccaatcgacggcacccgccgtgatatcggtgttggttatccgctggagttctgggcgctggttaacaccactgccactgctgctggcgccgccaccgtcaatgtgcagttgcagactagccctgacaacagcacctggacgaccatctatgacagtggcgcgctggcgctggctactctgaaggccggtaagcgcgtggtatccgcgaaggttcccgcaggtgtgatgcgctatctgcgcgttaactacacggttggaactggcccgcttaccgccggcgcgttcacctctggtattaacctggacgttgatgcgaataccccgtatccgactcgctctaaagtgaccggctaaggagatatcgatgtcagcagaaaaagcaaaataccgcgtgctgcgtttgtctcatattcataacaacctctggccggaaggctctgaggttgaatatgacggcgttccgggatctgcgcttgagccgctgaacgaagcggcaaaggcggctaaagctaaagccactggcaagtccgcagcggtcaatgcagtaaaacagcctgagcagctgaacgatgaaggcaatggcgatgatgatgctctggataagctccgcgaagagtatgaactgctctttaacgagaagccgcatcacaacaccaaacccgaaacgctccgcgagaagatcgccgagaagcgaaaagatttaggcgtctgagcctcagtttaaaccaaggggctcaggcccctttcttgtaggagcgttctatggaaatggtcaatctcaaaaccggtaccgacagctaccaggatgaaagcggtgaaacgaagactcgcgatgaatatccgtggggactatgcatcactctgaacaatgacaccctgaataagctgaaggcacagccgcagaatgttggcactgaggtgatgattacggctaaagcagtgattaaaggcatctcggcacgtgaaggcgacgatggcactttccgtagtgcggatctacagatcactgatatggcacttgcaccagtgtccggtgaagcaccgaagaccacggctgaaaccttatatggtggaggaggcgagtaatggcctcagttatcgaaatctgcaaccgcgcgctgagcaatatcggcaataaccgcagtattaacagcctgaatgaagccagcaaagaagccgggcaatgctcactttattacgaatcaattcgtgatgctgtcctggccgatttcgactggaactttgccacgaagactgtagcgcttgctgacactaataatccgccgctggactgggattacgcgtatacgtacccaacggactgcctgaaaattattgaaatccctgtgcctggtatccggtacccaactgcagcgatgcgcgtgcagtataccgtcggcgccgacagcgccggcaccggtcgcctgatttacaccgacctgccgcaggcgtggctgcgatatgtggcgcgcatcactgatgtgaacatgttcgattcaattttccaggaggcgctatcctggcgcctggccgcggctattaacatggttctcactggcaatgctgacctcggcaataacgctctcagcatgtatagccggatcatcctcagcgccagctctcacagcatgaacgaatcgcaggagccgcaaccgcctgttgatccctttaccgaagcgaggatgtgctgatggctgttagctggatacaaccgagtttctccggcggagagattgcgccatccctgtatggccgcattgatatggccaagtaccaggtggcgctgcgcaagtgcgataactttattgtgcgccagtatggcggggtagagaaccgcccgggcacgcagtttatcgccgcggcaaaataccctgatcgtaaatgtcgcctgataccgttccagttctcaacggttcagacctatgcgctggagtttggtcacaactatatgcgcgttatcaaagatggcggccttgtgctgaccaccggcgatgtaatttacgaactggcaacgccgtatgccgatattgacgttttcggcctgaagttcacgcaaagtgcagacgtgatgacgattgttcatccttcatacccgccaaaagaactacgccggtacgcgcatgacaactggcagattgtcgacgtcgaaacaaagaatggtccgtttgaagatattaacgtcgatgaatcagtaaccgtttatgccagcggcacgaccggcacgatcactctcactgcgagcagtgccattttcggcagtgagcaggtagggaagttattctatcttgagcagcctgccgttgactcagtaccggtatgggaaaccagtaagaccaccgcaattgatgatatccgccgcgccgacagcaattactaccgggcgaacacggctggtaaaaccggtacgctgcggccatcgcataccgaagggatggcctgggatggatggggcggcactggatccgatgatactggtgtgcagtgggaatacctgcacagtgggtttggtatcgcgcggatcactgctgtcgccggcgacggcctgtctgctactgctgacgttatctcacgtatccctgaaaatgccgtgggatcagacaaggcgagctataagtgggcgcggtatgcatggaatagtgtcaatggctatccggcgacagttgtctattaccagcagcggctgtactttgcagcttcctcggcttatccgcaaaccatctgggcaagccgtactggcgattataaagacttcggaaaaagtaaccctgttcaggatgatgaccggatcgtttatacctacgccgggcgccaggtgaacgagatccgccatcttattgatgttggatcactggttgttcttacctccggcggggaatttgttgccaccggcgatcagaacaaagtgcttacgccttcctctttctctctgagttcccagggttcaaatggtagcagcgatgtaccgccgatagcggtttcaaatattgcgctgtttatccaggaaaagggcagcgttgtgagggatctggcctattcgtttgatgttgatgggttccagggtaatgatctgacaatactcgctaaccaccttttccagaagcgcagcattgttgactggtcattctgtatcgtgcctttctccagcgcgttctgcgtccgtgatgacggtaaattactggtcctgacatatctgcgtgaccagcaggtttttgcctggtctccgcaatccagcgccggcaaatatgaaagcacctgcggcatcggcgaaggcagtgaggacgccatttactttgtggtgaacagaaccattaacgggcaggttgtacgctacatcgagcggctgtccagtcggcagtttactaacgaccttgatgctttctttgttgatagtgggctcagctatgatggccgcaacactgaaggcagaacagcaacgataagcggcggcagcggaaactggagttatcaggtgccgtacactctgacgatgagcggtggctcgtacttttccgccggcgacgtcggcgcacagattcagtttccgtataccggtacggatccggttgatggcactgacgtagccatgcagttgcgctgtgacattgtttcagtggaaagcggaaattcagtaaccataaccgcaaaccgtgatattccggcagttctccaaaataccgcaaccgcaaactggacaatggccagacaaaccttctcagggcttgagcatcttgaagggcagaccgtcaacattctttccgacgccagcgtagagccgcagaaagtcgtcaccggcggcgccgtaatgctcgaaaagcctggcggtgtggtgcatatcgggttgccgataaacgcacaattcgaaacgctggacatcaatattaatggccaggaaacactgctggataagaaacagctgatcagcaccgtaacgctggtagtaaatgccagtcgcggaatatgggcgtccacgcccggcggccagtggaatgagtacccacagcgcgagtttgagttttacgacgatcctgttgaagacgctaccgggaaagtagaagtgaaacttgacagcaactgggacaagaacgggcgcatcaagatccgacagactgacccgctaccgctttctgttctggctgtaatcccacgcattacggtaggaggattctgatgattaatgctcaaatcgtcccggccacggctgcacatatcgctgaaattctcccgttagtgcgcgccgctgacctgcaggagttttctgcaaccaatggctggagcgccaggcgagtgctggagtgcggactcaaaacctcaacattctgctgtgcaggtctggtgaatggtaaggtggtgacaatctttggtgtggcgccggcgtcaatgattggagggagtggcatcccctggctggttggcactgattcacttgaaaaatatcagcgtacattcctgcgccgctgccggaaagtggtcaatgcaatgctgtcggtttacccgtatcttgaaaactatgttgatgccagaaaccacgtcgcaaaggcgtggctccactggcttggttttaccctggaagacccggcgccgtatggcgtgcaaggcctgccgtttcatcgattccacatggagaaaaaataatgtgcgaaccagcaacgatcgccgccggcgcgacattagttataggtgcaatgtcagcctacaaccagaaccagcaatcaaaatatcagtcagcggtagcgagtcagaacgctgatattgctgaagcacaggcgcaggatgccgttaaccgcggaaacattcaagcggcagaggtgcagcgtcggaaccggcaggcagcgggaacccaggcggctacgatgggcgcaacaggcgcagatttaagcactggtacatcactggacattttcggtgacactgcgcagtttggcacgcttgatgcgcttacaaccgtgaacaacgcacagcgtgaggcgtatgggtatcaggtccagtctgttaattatgacgcagaggctaaaggtgttcgtagtgctggcaaagccaatgcaaccatgaccctgctgtctacaccgcttaaagcgtttggtgcatacaaaacattcggtgggacgtgggatcctttcagtcaggaagccgcgccaatatctgcggccgtcggcaccaaaaccgggcgataaggagataattcatgccagtcgtacctaccgtcaccggccgccaggtcgaaagccgcggcgtatcaacccagggatttcaggccgtaaatcagccaaacattaccgatgcattgggcgcagttggcactcaggcgatcgatgtgttcggacaggctaagcaacaagctgaccttgctctaacccaagatgcgactcaaaggctttatgctgctggaagtggattgatggacgatcccaaagaaggtttgatgactctccaggggaaaaatgccattggtcaggctcctgggtatatccagaaatttgataacgagatacaaactattgctggcacgctacctgagtccgcacgaaatgtgttcttaaagcaggctcagcagcagcgaatgcaatttgccactcaagcagagcggcatgaattaggacaacgcaggcagtatgagtccggtcagcaagacggttatttatccttgcaagctcagcaagctatatctaatccacagttgttcaaccaatcagctttgaatgccagagcctcaattatggcttatggaaaagctcatggacaaagccctgaagagatcgaggcaaactgggttcaatggcgtgagcaggctgccaaccgcgccagcgaagcatggtatacgcctatttatcaacagatgatggggccggaaggcaagatcgaagttacggacacgccgagtgaatcgcagctcttttccgccatgatctggcaggagtccggcggcaaccagtacggcaaagacggatcgcctctggtgtcacctaaaggcgcggtcggtgtggcacaggtcatggaagataccgggccggaggctgcgcggcttgctggcgtcgagtgggatcgtgataaatggctgaatgacccacgctataacgcaaagcttggccaggcatacttcggcgcccaaatgaagaagtatgacaataacccggttctggcggtggcggcgtataacgctggacctggtgcagtagatggatggatcaaaaagtttggcgatccgcgtactggtgctatcagtaatgagcagttcgctgctgcgatcccttacgatgaaacccgcaattatgtggcgaaagtaaccggcagtgccccggccatcccaggaacagcgacaatgcaaaatctcatcaaccagccattctgggatgcaatgagtccacagaacaaatcttcgatgatgagtaaggttgctggaatgtacgacatgcaggccgccgcaggacgagtatcactgcagagtcgtatgcaggatgacatggcgaagctggaatccggtcagccagtcaatcctatctctgagcgggaatggctggcggttatgccgttgcaagctagtccagcagaacgcattcagatgcgagagtcattcaagcagtatcagcaggcgatgacgctgcaaccggtttatcaatccatcatgcaaggttccgcgcagcagggtatcgctgcggtgcagtctatggtgcctcaggaagatgaccctgacttcaaatttaagcagagcctatacgcaactgcccaggcaaaattgaatcaggtaattaaagcgcgcgagtccgacccggggacgtggctgcaaaccaactctccagtggtgaaaaacgcctttgagcagtaccataacaatcaggtgtccggtgaatatctggtttcccgcctgcaagctgagaaagaccgcctgggaataaacagtaagaaggtacttcctgactcgatggtaaacagccttatttctcagatcgacaacaataaggaatccagcgttacagccattcagtcggtggcacagtcctttgggaaatactctgatcaggtcatgcaacaggtgcaaaaaagcgcctacccggcgttgcaggtcatcatggcgaccaataacccgcgtgctgccaacgccctctggcaaaaccgcagcgtcaaaaccgctgatctacgtggcagttttgaaaaaaccgacgccgacagcgccgactcatcctggaatgaccaggccaaagcctttgccggaacgatggttgtccagcctggtggagccgccgtgtggaacaacttcaacgagcagggtaaacgtctgacctacacctatatgcagcgcggcatgtcgccaggcgacgcggcaaagcaggcatatcaggacgttctgggcgagcagtatcagaccaacggcacctggcgcatgccgaacaacgccggacacgatattcgcgatgttaacgatggcgctaactactacctgaaaaaactgtcagtcgaccagatcatgccgcttatcggtgattcccgcctgccggatgaggttaaccgcgagcagagcatttcacgcattcgtgataacgctcagtgggtgactaacagcgacgaaactgggcttactctgatgatgaacggtctgctggtcaacaatgctcagggacagccgatcaccgtgccgtttgctgatctggcgaaacttggcgctggcaaccgcaccacctggaacagcctgaccaaattcgtgcagacgccggttaagtacacgcctggccagtcgaagaattacacggcggaaagtcagcgcgacaacctgatcaacattatccagaacggccagcagacgggacgataagatgccaatttatacagatgatcctgggcagggtataaaccagccgttgtcgaatgcccaggcagggctgggtgaatcgcttctttcctcactaaaagaggggttcaacgaagggcctgtcgtatcaggctatcggttttcccaggccgagaggctggcgaatgatcccaattcgaccattgtcgccaaatcggatgccgatgctcgcctgaaagagtacggcgtgaaaagcattaacgtaccggaaagtggcgtcacacagtcgtatcttgaccatgtgatcagcgagcgccgggaatcgctggcgaaacagcagatcgccatgtcggccccgtccggatgggtagccactccgcttaactttgcagcaaatcttgccggttccatggctgatccaggaaacgtggcgctggcgctggtcccgttcggtggagaagcgaaggcggcaaccatgcttgggcgtttcggcgagcgtttggctaccggcgcgcggcttggcgctggccaggccattgccaccgtgccactcacggcacaggcagcagcagcagaaggcgacgacttcacctatggcaatgcgctggagagcaccttctttaataccctggctggcgggctgatgcacgcaggcggcgggctgatcgctgatgtagtgcgttcccgcagggcggccgctggtgaaaaccctgccaccccggcagacgctcagcccgtaactgatgctcagccaacgccggtggtcacgcctgacaacatcccggcaggtgtcaatattcctgagtccggcaccaacgctgacctgtcagcggcaatcgcgcgggatgcagaggcctatgcctacagccgcgcctatgatgatgtcgtgccggaatatctggcccgtcagcaggaggtacagaccgggcgcgtcgacaacgtggccgatctgcgcactgagctggcggccaacaaccggcaaagtgaagcgcttgacgctacgctggcccagcgtacaaaagagtaccaggcgcaacgtatgaacttcaaagcggcgcgtgccagggcacagcgtgatattcagggtgagaaagacactatcgccgcgcgtaatcaggaaattaaccagacgcttgagcgcaacgccgccgcagaacaggcgcgcggcagagagtcgcaactgtcacgaaaagagatccccgacgacctggccccattaatcgaccagcgcgcacagcagatccgcgaaagcatgcagatgtcgccggtcgccggtgccgttcgtacagcgtcggcagcagtgcgggaggccgactggagcgtaaaccagcaggcttaccgcggcgcgctggcgcacatgatggaaggccgctcgcctgacattgagccattctatgaccttcacaaaccagcgctacgcgagcgtgctatccagcgcatccagaacccggtgcggcaagctgatgaaggttcacgcgccgtcagtgaaaccgccgatcgtgtgtggcaggatacgcagaaggctgaccatgaaatcacagcggccactgccgatctggaaaatgaatttaatatcagtgacgcgctgctgaacgacatagccacagataaccctgagctggcagcgtcaatgcgcaagaacattgccgcgatccgtgcagaggccagtgacgactctatcggcaaagcgtatcgcgctttcgccgcctgtatgattaaccgggggctgtaatggctaacgaatttctgacgcaatgcgaaatgaccgtcaatacagctgccgggcgcaagctgtctgaggacgaaatggaatcgctggtgcgtgacatgaacgacaccaccaaccggatcctggctggaaatgaagccctgacgctggaagaggctgcgatgcgcgccgcgcaagagcttggcaaccgtgatcaactggcaaaagtaatcgaggcacgcaacaaagctataaacacgcgcattgcagcgcagcgccttggcgagcttcgtaggacttggaaagacagacctgacatcgggcttgaggcaatgctggttggccgtaatgacgcgcgtaccggctcacgccgatctgtatcgtctgaggtggcccaactgcgcggtaagtatcacgccggtatcaactacgatttcgaccaggccggactggttaaatttattgccagcggcagcaacgaccgggagatcgctgacgctatgtggcgcatcggtcgcggacagaaaacggacggaatgacgccgcaatcagtaagcgccgctaagatcataatgaagtggcaggaaactgcgcgcgtggatgaaaaccgtgctggtgcgtggattggcaagatgcccggctatatcgtccggcagtctcatgacatcctgaaaattcgtgccgccgggtatgagtcctggcgcaatgccattcttccgcgactagatgatgccacctttgacgggatcacagacagagaagggttcctgcgtggtgtctacgacggccttgcctccggtgttcacctgacatctgaaaatccagactggatgaatggcttcaagggatctgcgaatgcggcgaagcgcgccagccaggagcgcgtgctgcacttcaaagacggtgtgaactggcacgaatacaatgagcaattcgggaccggaagcctgcgagaagcagtattcggtggcctgaacagtgcagcgcgcacgacgggcatgatgcgcgtgctaggcacaaacccgcaaaacatgttcaagtacctgacagacaccatcgcaaaagacgtgagaaagcagagcaacccggcggcgctgtctgacttcatgaccaaagtgcgtcggctgaatcgtacggtgatgcctcaggttgatggatcgctgaatatccccggtagtgtcggctgggccaatgcctccgctaacgtgcgcggctggctacgtatgagtcagctcggcggcgcggttatctcttctttcaacgacgtgccgatctctgcaaccgaaatgcgttatcagggccagaactttatgcaggcgcttaccggcgctatgaagggccggttctcccgttataccagtgatgagcagaaggagatcctgtcatccatcggagtttactccgacacgatgacacaggagataatccggcgcatgtccggcgatgacagcatgagcgggaagatgggccgcgcgcagcagttgttcttcaaatacaacctcatgaacttctggacagaatcaggccgtaacagcaatgccatgatgatcaccaactggctggcgaagaacgccgatcagcagttcactgcgcttccggaagacctgcgccgcgttcttgacctgcacggtatccgtgatgctgagtggaacatctaccgcagcatggacatggcagacagcgagggtcgcaaattcatgacgaccagcggcatccgtgcagttccggatgaggtgatcggtgactatgtagcgtctaaaggcctgaaggtcaccgagcgctctattgcggacgccagagagactctggagagccagctgcgcgggtacattctggaccgactgaacatcgccatgtcagagcctggcgaccgcacgcaggcgtttatgaagatgggtacggttcctggcacggtggcgggggaagcggtgcgcttcgccgggcagtacaaatctttcaccgccagtttcatgcagaacgtgctgggccgagaggtcttcggacgcggctacactcccgccgggctgggggagtctaaaaccggatcgctgaccaatgcgttgttacgaaatggaaagggagccttccttggggctgcaaacctctttgtttgggcaactatgtttggttatatctccatgcaggcaaaactcatgctaaaagggcagactccacgcccggcagatgccaagacatttctcgcagccgcatctcagggtggcgggcttggcatcttgggcgacttcatgtttggcgaagtaaaccgcatgggagcagggcctgttacgtcgctgatggggcctgcagcatcgaacgctgacagtattatcacgctgctccagcagaccacgcgcggcgatgcggaccttggtgactggtatcgcacagctctggacaatactcctttccttaatgtgttctggctgcgtacggcgatgaatggtttaatattaaaccgtatacaggatgctctggacccaggatcgcttgagcgttatcagcgccgtgttgagcgtgagcagggtaatgacttcctgatcccaccatcgcagttcatgctaggtaaataataatgaagaaaattatattttttgtttcaataatgatgtctgcattttcttttgcagggcaaaaagtcaaatgcgaacttcaatatcttggggatagcgataaattcaaggtaactgagttttcttttatgggtattccatctgattcatacctttatacctgtgcagactgtggagatatccagataaacgtgttcccatctattcaatctgtcgcttcctactcatttgaaaacaacattgattttgaaaggaaaatcaatgcggaatacaacaggaaagacatagctaaacttgaaatggaaaatgttactcaaggtgggagaataaattactcaatcaccgatactggtttggcagagttttacccaaaaggcaaaaagacaagttacctctactttttagcaaagcaacaaaatggtaaagaacaagtaggttattcaggatttgttacttctaacggtgataagtcatgctcaattattgcgacatatccaggaaaagaaatatcttctcagggaagtaaatcgctaagctactttatgaaccacatctcaatgtagcgtgacatgtcacaacgccacacaacaaaaagcccgcatcgcgggcttaccaaaacttgtaccatgggtctttatctttcaaagggcaatccttccatctcttagccatccattcatattctttaaagtatgagcttctattttctttttctctaatggcttgtataagaggcagtgaaatctgatagttatttactacggaactgtaaaaaacctctttaatcatggtttcatcataagtttttcgcttcacgcttacagccatacgttcgtagaagcctaagcagtagatgatctctctcttctctttcttttcttcgtctgtaagatcagcctgtccattgcttggatacatgtaagagcgaaatgctttgttcgattcatgaatgcgtcgcatcgtagaaaggcctttcttgtaatctacatcaaacctgctttcaccaaggaagacagaggtatgtacctttctcgcggtattaacattataaataatagtagcaatagcgatgaacaaaccaagcgaaaccgcgactgcacttactatctgagccacagccatggcaaattgcatatcttcacttaacacaaactttctccagacgtgaaaacggggccatatggccccgctattgaactacccgaattttaaacgccttcgtattcgtcaaattttctcatatgggttcctcctgtatcggtgcctaatcgctatggattacccgtaaggtaatattacgcggtccgaatacctcttgcaaggtcgatgttgatttcggtggacattaccgtaagtaactagatgcttaacacatctactaaaacgatagcatttccgatacttaaaggcgcttccctgcgctcagtatcagaactcagaggcgttcttgttgatgtactgcgcgtggctgcgtatgtcctgcagacagcggctaacaccaacaatatagctcaccatagttgtgaattccgccgaggcgccggcgacatcatgaccatcttcatcaagctgctgcagcaggttcatcagtagtgacttctcagccaggccaacaacaccctcagggcagtggatcatctcacggtatcccggcttgagtgggtaactgtatgaaggcttatccccttccttcattgcctccagaatggctggcataaaactggccacaaccttctgagctttatccgccggtgatagctcctcccgcacgtaacggcctgtcttgcggatctgaggaagcacttcactggtaacccatttgcggaatcggtaggggatggtgcccggcgtaacggcatcccggcagcgaaggattaaggtgtagaggccggactcatttatgacgctgacgttttgcgctcccttgacggtgtaagttgaacttacccccttctcgtcatcatctagagctttcagagacatgcgagagttagtgaggccaagcgccttgcaaacatctgatgcagcaaaccatgggtttccgtcgatattaaacatgcggattggtgtagctgactcaaatttaaaaactgcgtctggggatggagtgctttgagaagtcataatgatcacctttgtagtcaggttaatcaccacttctgagaccaatcagatggtggtgaactgtgcagagttggtcttaccggctacaaaggacccggcgcacctttcggcgcccccacacagcccaccatagaataagggtgctatgttttacgcataaaaaaaccgcttgcgcggtatatgcgcctttgtagtattccgggagaccaatcccggcaccggattttgccgatgcctgatcactatggcacaagtaatatgcgttgtaaatttaccgcaaaggtaatgatttcatgcattttaggtgatttcaattcttatttggtttgctttctcaattgcagtgcacagtaatcaaggtgcgtttgaagatcacgcatcgacatctgagagcttgtaacgtagttaatgagcgcaacaagttcagcaagcgcgccgctgacatcgtgcccgtctttgtccagctccctgagtaaatccattaaatgcgagctctcaaccagagagcgaacgccagcaggcgtgtgaattcgctccgtgaaaccttcttcaagagggtgatggtaccgctgcgacatctcaacaactccacaaaagcactgtatgtatatacatatatcaaaaccttaccaccatttccagtgatgtttaaattaccctttaggtaataatgccattcaatagtgtacgttttattcatatagggattgtcaggtaatagaatgacggtagtgcggtgcgccgggcgctgcgaaaatcggagatttctacatgacggtctcaaccgaagtcgaccataacgactacacaggtaacggcgttaccacgtctttcccatatacgttcaggattttccagaaaagcgatctgatggttcaggtagccgacctgaacgaaaacatcacagtgcttacgcttgacactgactacacagtcactggcgctggaggttattcaggcggtgcggtggtgctggcgtcaccgctggcaaatggatggcaaatctctatctccagggaccttcctgtaacccaggaaactgatctacgcaaccagggtaagttctttgcagaagtccatgaagacgctttcgataagctgacgatgctgattcaacagtgctttggtttccttcgcctggcgctgcgtaaaccatcattcattgctaactattacgatgcgctgaacaacaggattaagaatctgcgtgacccatcacaggatcaggacgctgctacaaaacattatgtagatgacagcgttgcaggttcaaattcgcatgcagacgatttattcaagagaacgctacgtgttccagaatcatctgttcagcccgttccatttcttgatattcgaaaagaaatgttgcttgggtttaatagttttggggatccggtagcaattgcagggcaaacagagacggcagatctggcattaaagttggctgcatattttggcacatcccttattggcatgccgttatcagggaacctatttgatctcgttaaaaacatggttacaccagcaatgtttcatgcaaaggcgggtaatacagataacggcggcattggatttgcacacgataattcattgtgtttccagaaaatgtttaacgctgtacgtgataacggcggcggattagtcatcattgatgatgagtattgcgttgatttttgtcttttcccgcacactaatacaactgtgatgtttgcgggaaggggggctatgcagtttattaaccctcgttctgcaacaactggtaggggtggtttcataatcgggagtagccgagaatttaactttgaccaggcatggagcttatatcagtctggtaattatccaggctcgattgttaacgcttcgttcactgatccagcacagaaacaatatttgcgtgataatcagcaatttgttcaggctgagcgtgttaatttcatcaacccagtaataaaagcttattacactgactctacttattggggcgggtttgcaattaactgtgtgaatgctcaacacatcagaatacttaatccagtatttaatggatggactgaaggtgtcaatgtgggatctgacgttcctccgaatactccatcgtgttatgacgtaaaaattcataacatgcgagtcattaaagccgatctggttagaacttattacgccggatttttcttcgcaaactcaacaaactgcgagatatcagagggatcgttagaaacccctctgacagcaggtacaagcaacggtagctttggtgcgacaaacttcactgaagattgtgtgattagagatatcaacgttcctaatctggggcgtactgtatcttctgaaggcattttgataaacaacactaagggttgtttggttaaaaacataaaaatgggtaatgcgaaatctgccgtaagtacattttatgtagatgcaacaactaatgatgcaaataacccaaactttatagacggggttgaggcgaacaattgcgaccaggctctggctgtaactggtaaatacgcattattttctaacgtaaaagctgtcaactgtctgcaggaactgtttttcagaaatgccaatgcaaccggaaacagatttaaaagcaacccagactggatcactatcagtaatcaaagtgcaaacctaaattattggtacctgattaacaatacagttagtggctggcgtagaaaatatacagggttacgcccccctgatattttagggacgccattcgcttcactatcttcatggaattctaataattcggtgaaatttaatagtggggcaacgggtacattcctctataaaatacctgaaagcatgaatgcagtgtcagggtttactgcttatggagactttagcgttggcgctgcagcggctgctactgattccgtatgtacgatagatgttatttcaatggcagctgtagatgggaaccagacggcaccagtcattcttcttaccgcatcagtttctgcgcattctaatggcgatggaatatggtcactttctgcagatgttcagtccacatctcctggctatcttccaatggaaggtgctgcgagtggggtagataataccatgtatctccgtgttacatattcaaatggtgtagcaaacaacaccttaaaagaaattggtttacgtcactatggagtataaaaaatgaaaggcacagatactaagcaggttgattatttatatcgtggaattatggattatttcagtggcatgtctgggctggacataactattgagcaaatttcggcaagggacaagtttattgcggatagcgccatagtttgtgatgactctttagatgaagaggttattagtcttcatgatgagttcgtgtcagccgatggggatccgttaaagcagaaagaaattatagagaggactatagcacttcttcacccttcataattattaccatttattcagattcggattattgtgtatgatgaacttaccaactataggaggtaaatcatgcacaataaacggtggtcaccatgtctgcaacgctaaccgctgacacaataaatcaggggcttagctatggcgcgctggcggcagttatcgctggcgtccctcccgaggttgcgcttggctccctggcaggggcggtaatttttgttacctcagctgttgagtatcctgtcaggcgccgcgttctactttcacttctcagcttcctctgcgggcttctcttctacaaaccaacagcctcgatactaatcgggcttgccagcatgataccgacaatcacgcaggactcttttgaaagaggaatcgtgtattccgccggcgcgttcgtcgcgtctatcgtggcggtgcgggttggcatatggctgtatcaccgttctgataatccacgcgatttaatccctggaggaaaagacgatgacaggtcatgatctgttgctaataaccaatgcccttatatgcgcaggaattgcgttcagggtgatgttcttccaacgcaacggatcgcgccaccgccggtggggtggatggattgcctacttcctgattgtgtcggccgccagtatcccggtacgagccatttactcacttctctatcacttccccatgaccgcagatctttctgaggtcgttatcaatgctgtgatgctggctgccgttctgaaaactcgcggcaacgtcgtgcaaatattcaaaatatcgaggtctcaacatggacattaatcaattccagaaagctgctggtattaacctggcgctggcgacacgctggcattctcacattgttgcagccatgaaagagtttggcatcagcaagcctgatgatcaggcaatgtttattgcccagaccgggcatgaaagtactggctttacccggcttgtagaaagtttcaattacagcgtggccggcctggccgattttgtccgcgccggtcggctaacgcagggtcaggcaaactctcttggccgccggcagggcgaaccatctttaccactggaacgccagcgcgcgatcgccaacctggtgtacagcaaacgcatgggtaacaacgggccaacagatggctggttttaccgcgggcgcggacttatccagatcaccggcctgaacaattaccgggactgcggcagcggcctgaaggtggatcttgtgcagcagccagaactgctggcgcaggacgagtatgctgctcgcagcgcggcgtggttcttcgctaccaaaggatgcatgaagtacaccggtgacctggtgcgcgtcacgcagatcatcaatggcgggaagaacggcatcgatgaccggcgcgcgcggtacatcacagcgagtaaggtgctggcggtatgatctgggcattcgtcaaagcgtactggaaacagttgcttatcgtggtgatgcttgctgctctggtgttcggtggcatgattgcctggaatgttcacagtgacaggcagtacgacgccgggtacgcacaggcaaaggcagaccgcaaagcagaagatgagaaagctcgtcaacatgacgaacaggagaaagcaaccaatgaacgagaagcgcagcagaggatcgaccaggcgcgcaatgatgctcttgatgctgccgctcgcgctggcaggttgcagcagcagctcgttgccatccgtgagcagctcaggcagtataacgccactgtcggcgctgggtcgtcagccgcagacaccggaattttgcttaccgacgtgttcgaaaaatctctcgaacgaaaccgacaactggcagaatacgctgaccgggcagcagaagccggaagggtctgcgaaaggcagtacgatcaactgacgaaacagggtactgtttcccggtgacggtatataaaacggtatggagaatttctcgttttataaatttgttttcagtcaattggttacgagtgctgtaaataattgagtgggaataattcctgctgatagctgaaccaaaccctctgtttacagagggttttttttatgtcctggtaaatggcgctgaggaaggattattgagcgtagtctaaatatagtctatattaaaaccgagacatgaccattaggcggaccaacatgaaagtagagactatcagctacgttaaaaagaacgccgcaacgcttgatctgtcagaacctatcctggtcacacaaaacggtgtgcctgcttacgttatagagtcctatgatcagcagcaggaacgggaaaacgccattgctttgctgaaattgcttactctgtcagagaaagataaatcggaagggcgcgtgttctcgaaagaccagttgctggatggccttgcggattaaacgcagcgcgctcaacgttaagggacttccatggaacagcaggtgacctttgagtacacgcttacggtgaagcactgcatcgacacaatagcgggttttctgaagcgtgttgatgttgagccgcgtccggttatcgcagatattctcacccagtttgagagcaccgtaggacagttccccttgggctgccagatttgccccgaattgctgaaaattggctgcgccaaatatcgggagtttaatcacgctgaaggctaccgggttttgtattccgtagacggaactttagtaaccgcgcatgcgatcctggcacatcggcaggatgttcagcagctgctgtttaagcgtctgatcgtggcctgatagtcctaaatgtgtgtgttttacagagggtttttcataccctctcttcactttgtccatgacttatccgcacaacctgccgccgctgcagccagccgattctcagcgccagccccagtacgaccagcgataatagacccgaaatagcaaggctcctttctatccccagatgttgatttagccaggcataggcaaatggcgagacggcggccagtagttgcgctgggatcaacagccgtccggtacgccgcgcgtaatcttccgccgcgaatagctgcaacggtaatgttgctttaaataccgtcgtcaggccgttaatggccccgtaggcgaaaacgaaaccgccaacggtccagcttagcgaggcggcgttgaggcccagtaaaaagcagagcggcaatagcgctgtggtcaacagcgttagccggagtggggtgagtcgcgctcctgaaatcacctccagaaatcgggcgccggtctgtccgatgccccatagtacgcctatcgttaccggcagaccgtagctggcgataaactcaggcagatgggtggatgtgccgttagaaataaaggtgaccaaagcgataagcgaggcgtacagcaggcctgtgcgctggtcgcggcgggaaagcggcactttctcctgatgagcgccccggtcgggcaagcattgattaggcatccgccacagcagtagtgcgctaagcaggccaaacaggctgtagattaccagcgctccacgccagcccattagcgcgagcagcgcggtgcccagcggccagaatatcgctgaggccagtcctccagccagggtcacccgtgaaatagttactttggcgcgttgaccatacaggttaaccagcgcggcgaacagcgcatcgtatagcgccagccgcataccgacaccggccagtagccatgcgacgtaccagaagatcaggctgtctgcctgcgacattgccagacagcttgccgcgatggttaatgaaccgatgaacaccacccgctgaccgccaaaccaggccaacaggcgggcgataaaaggcgagatcgccgccatcatcagcatggcgaaggtcaaaccgagaaagatctctgttccgccccagccagtatcattagcaatagcgccggcaaaggtaccgggcatataaaaaacgatcccccagttgatgagctggttgccgccggctgcgagggtaagggaaagaggcgcggtgccaggcaagattgacgttttcattgaattccagagcgttatgcagttgtcggcagcatatcgcgcgcgctattgtgcaggcagcacctggggcttatagcctgcataagagaaactttgtgatgacgatgctgaatttggtaaatctgaccaccttccggctggtggcgcagcgcggcagtttttccgccgccgctgatgtactgggaatatcgcagccggcggtaagcctgcaggttcgccagcttgagcagttcctgcagacgcggttggttgagcgtaccgggcgagggatcaaggctactgccgccggattggcgctactggcccatagtgagattattgagcaggcggtgaataaggctgtgcagtcggtggctgagtttaaccatgaagtgcacggtacgatgagcttcggtaccggggcgacggcctgtattcatttgctgccgccgctattgtgccatctacgcgagaagcatccgctgttaacggttggcgtcacgaccggtaatacgcttgacattgtacgtgcggtggaagagagccggcttgatttgggattggtgaccttacctgccagcggccgcagcctggcggtaacgccagtgctggaggaagagtttgtatttattactgccaacgatgatgaaccgctagtggggcaattgacgccttcactgctacaggcactttcgctaatagcatttgaagccggcagcgggacccgtgagctgatcgatggctggtttcgcgctgccggggtaaactcggcgccggtgatgcaactcggtagcattgaggctatcaagcgtatggtgcgtgctggtctgggatacagtatcgtaccgaagatggcggtggcggctgaagatgaccgcaccggaatacgtgtacagtcgctatcgccgcggctctatcgccaactgggcgtagtgatgcgtcaggataaagttatcaacaaagggatagcggagatgctgcgtctgctgcaccaactaaaaattttgccgtaggcgttattcctgggctggggtcgttggtgtcgcgggagcatcaatggtgatggtcgattgctgcgactcttgtttgtcctgatgatggtaccaggcaccgatagaggagtagacaaagcgtccaaagaagaagagaaaactgataagtagtacgatacgggtcatgcgacggttaaatcgatgtcgtttacgcatactgggtgcctgactcacaaaaggttccttgaagtatacccgaagacgggcgatgggggtattaagtcatagtatagcggcggggtcaattgtcggcggtgtaaaaatcgtagtgctaaaacattacttaatgttatataagatgaacatcgtatttacacggattttgattattgcaccagtccgcaaaaaaataagttttattaatattagctaaatagtttgttgatttgcgtcaattgcttgattccattggccactaaaatcgtccatctgttccgcatcgttattactttcgcggttagcctggtcgggttggatgcctgtctgaatatactccgcaggagttggggtaatctgtcgagcatctatgagtattattaaactatacaaacgatatcaggataaatggtgggcactaccgctcatcctccctacgctgctgttgccgctggcgcgcgccgcgaatacatttgcaaatcttaacggtcacaccgtctttctgttttatcttccgctggcgttagtattgagcctgatgctgtttttcggctgggcggcgattccgggcattatagtcggcttgctgctgaccattacgcgcggaatgaccttcgagcaatctatcggcgtattgtttcattttttgatcccttcagtgctgtgctggggcggttatcgcattttcgttccacgccgtcagcagatttcacatggtaatgttgccctgatgccgtatcggctgttctggcaaatgctgctgccctcggtaatttttctcattatttcgcagattgctgagtatcttggcctgcatccgcgggcggcggaactggtgggttcaacgccatttagtttacgatcgttaatcacttttcaggcgctgatggtggggtgcttgaccggtgtgccactgtgctattttttgctgcgtgttattcgtaacccgctacacttacgcggttttatatcccaggtgcgtttacaaatcgaccaaaaaataaaaccgctggaaattattgtctgggcaatagtattgttaataatactggctttattattcatgccgttaaatgccagcagcacgatatttagcacaaattatacattgtcattacttatgccggtcatgttgtggggggcgatgcgttttggctatcgttttatttccctggcgtggccgccgatattaattctggttatccattttcattacagctacctgccattttccccgatctacaataaccagctggcgattacctcctccagttacctggtgttctcttttattatcgcttatatggcaatgctggcgacgcagcagaggatgatccaccgtcgggttcgccggatggcctttctcgacccggtcgttcatatgccgaatttacgggccctgagccgagcgctaaaccactcgacctggtcggtgctgtgctttttacgcatgccagagctggagttgcttgggcggcactacggcgtgatgctacgcattcagtataagcagcagctatcggaatacctgagtcacatactgcagccgaacgaaatggtctatcacctttcgggccatgacctggtgatacgcctgaatagcgacgatcatcaacaacgcatcgtgatgctggatgagcggattaagcaattccgttttatctgggatggtattccgctacagccgcccgtcgggatcagctattgcaacgtacgttctcctgtcaagcatctgtatttactgctcggcgaactgaataatattgccgacatgtcattgaccagcggccacccggaaaacgtgcagcgccgcggcgccgttcacgttcagcaggggttaaaagaacgtgtgtcaatgatgaaccagatcctgcaggcgctggatcagaatcgttttcggctgatggcgcagcccattatcggcatgcgcggcgatagttatcatgaagtcctgttgcgtatggtgggcgagcagggcgagctagttgcgccggataattttttgcctgcggcgcacgaatttggcctggcttcgcgcatcgacagctgggttatcgacaatacgctggcttttatgaacgctaatcgccatacgttgccgggcatgcgtttggccatcaatctgtcgccagtttcggtcagccgcagccgtttcccggacgaagtcgaggaaatgctgcatcattataatattgagccctggcagcttatttttgaactgacggaaaaccactcgctcagtaatccggagcaggcgcaacaaaccctcgcgcggttgcaggagttgggatgccgggtggcgattgatgatttcggtaccggctatgccagctatgcgcggctgaaaacgcttaacgtggatatgctgaaaattgacggtagctttatccgtaatctggtcaccagcagtctggattatcaggttgtggcgtcgatttgccggttggcgcaaatcaaaaatatgcaggtagtggcggagtatgtggaatcgccggagatccgccaggcggtgatttcgctggggattgattatatgcagggctttgacattggaatgccggttccgatagaacaactggcctgcgcggctgacgtcgcataaaaaacggccgggcgtgtgacccggccgttttagtgaaagatgtcagctttacgcttcttcttcagtaattttcagcagccattcaggcacgccttcccagtactgttgctctttttccagatccagcagcaccaacgcattctggctaaaccagtcatgcgggaaaattaacgtccagtggttggcttccgtcttcaatgtcagttttggcggcgtagtggtcgcctgacgctgattgttcagtaatacgcccagacgcagtagttggatcagcggcaagaactgttttttcttgaacaaggtaaaacgcggcaaatcatcaagcttgatagctttgcggtgatagcgtaccagcgtggccatcagggtctgctgttcctgattaaagcccggcagatcgctattttgcaggatataggcagagtggcgatgcatgccgctgtggttaatgttcagccccacttcatgtagcattaccgcccacttcagcagggcagacagatgcgggttagccagtttcgggttttgctcctgccactgttccagcatctgagtggtagtctccagtacccggcgcgcctgttcgcgatcgatattgtactggttcgccaggctctgggccgtacggctgcgaatatcctggtggcggaagcgaccttccatctcgtacaacacgccttcgcgcagggcgccgtcggacaggcgcagttctttgatcgccagcgcgtcgaataccccgcacaaaatcgcaaggcccggggcgaataccgctttgcggtcctccgacaatcccggcaggcttaatgagtcgaagtttttattcttcagaagctcactgaccagcatttcaagacgttccggggtaatgaagccgtctttctcccccatggcgaccagcacttcgtgcgcggctttgatggtgccagaggcgcccagcgccacgttccatccctgaatacggaactgccaggccagggtttccagtttctgcaccgccgccaggcgcgcgcgctggaagttttctttattgataacgccgccggcgaaataggcctgcgagaagcttacgcagcccatacgtcggctttcaaccaggcggggctcgaaatcttcgccgatgacgagctcagtcgaaccgccgccgatgtcaataaccagcttacggccgcgctccggttgcgtatgttcgacgcccataaaaatcagacgcgcttcttcgttaccggagattatttcgatgggataagggataactttttccgctcgtttgagaaaatccgccgcgttagccgcctggcgcagggtatgcgtcccgacgatacaaacgctggaaggggagaatccctgcagacgttccgcaaacagcgacaggcagttcagcccacgagtaatcgcttcttcgctcaacaccgagttttcatccaggccatcggccaggtgtacgcgctgcttcaggcgaccgatgatctgcattgccccgtcgacgacacgggcgatcaccatatgaaaactgttcgaaccaaggtcgaccgcagcgaactcctgcggccgaggggttttttcgtttattggcataggttaatcgggttgttcgagtgatttgagataatcgtaaatcgctatctgtgcgcgtactttgcggcgattgccgcgcggcacgtagcgattactcagttctttatcaagatagcgcgcttttacggtatcgttgaacaggatatcgagaatatccagtacgcgttgcttcagacgcgggtccagcagcggtacggcgacttcgatacgatagtcgatgttgcgtgtcatccagtcggcggaggataaccacacctgtttatcaccaccgttttcaaaacaatagaccctatcgtgctcaaggaaacggtcaacgatactaatcacgcgaatattttcgctaattccctcaagacccgggattagcgagcacatgccgcggataagcaggttaaccggcacgccggtactggaggcggcatagagtctgtccaccagccctttatcgaccaggttatttaatttaagcgtaattccggacggttgcccattctgcgcattggcgatttcgcggtcgatcatttcatacagcagacgacgcgagttctgcggcgacaccaacaggtagtcgaagctgactggccggtaagggttttcgataaaattaaacacgcgacggacttcattagtgatgcgcgcgtcggcggtgaggagcgaatagtcggtgtagatacgagcggttttctcgttgaagttgccggtgccgatatgcgcataacgcactacctcatcgccttctttacgcgaaatgaggaagagtttggcgtggatcttcagccccggcgccgagaagataacgtgtacgccggcttctgtcagacgtttggcccagtgaatattggcctcttcgtcgaagcgagcctgcagttcaaccaccacggtcacttttttaccgttgtgggcggcgtggatcatcgaatcgataatccgtgaatccttagcgacgcggtagatattgattttgatcgccagcacgctcgggtcgaacgacgcctgacgcagcagttcaagcacgtgctcgaaggtatggtatgggtagtagagcagtacgtcgcgttcgcggatggcgtcaaagccgttgcggaatttatcgaaccacaagtggcgcaggcgcggcatcggtttattgaccagattggccttgccaacattcgggaaaccgataaagtctttaaagttgtgataacgaccgcccggcagcatcgaatcgtagtttgagatggagagcttatcgcgcagcatttcgaccatcgcatccggcatatcgcgctggtagacaaaacgcaccggttcggcggttaagcgctgcttcaggctggaggacatcagctccatcaggctcgattccatttcgtgtaccaaatcgtactcggcatcacgggtcattttcatcgagtatgcattcagggcatcgtagtcaaagaagcccttaaagatatcatccaggcagtaacgcagaatgttatccagcagaatcattggtttgcggcgtcgcggcgtttccggcggcaggttcacaaagcgtggcaccttatcagatggaatctccagcagcgcataattaatggtgtcgccgcggataatctccaccgccagataggtgtaatcatctttcaagaattgaaccaggtccgtctcgcggttgatcagaatcggcgaaatatgctggcgcagatactgtttgaagtagttgcgcaaccaggattgctggttaacggacagctggcgttcgttaatcaggaagatctgattacgcgccatttccagcagcagttcattataaagaccatcaaattcctgatcggccttcagcacgcgggcctggattttgcctaacagatgacgcgaatgggcggtactaccttgttcttcactgataagaatgcgtcgcttaagttcagcgaagcgcactttgtaaaactcatcaaggttattggagtaaattcctaagaagcgcatgcgctcgataagcgggttgctcttgtccgccgcttcctgaagtacgcgctcgttaaaggacaaccagctgagttctttttcgatgtatagcttttcctggcccattacaactcacactccggatcattgacgtcgctttttcattatggcgagctttgccattgaatgtccaactatgtcaaagcaatatgacagttttcttgcaatcagatgccgggaaaaagcggacgcgtttgtttgcttacgttatgttcagtcaggggcgaaatggagggcgaaacaatgtgggaaacgcgggcgctggagctcaataatcaggacatctggcactggccgtcggcctgtcggttgattgaatacgcaattgagcatgattttaataccgtggtggtgggacaggccgagttatttggcaagctggtttcgccacaggggtataccccttttgactataacgaccgattgtcgagccaacaacgagcgcgctgtatctatctcaaccggctggcgttacgctgccgtgagcaggggttgcgatgttatctgcaggcgaaagaacttagcttcccgaccgaactgttattagcgcatccggaactgctggataccccgcgcggggtgcgttttgatgtcgatttctggagccgctggttaaccgacaaaatccgcgccgtgtgtcaaagcgtaccggcgctcaccggtttgattatcgcgctctccagtaccgatggattattaccgatctctcgcccgcagtgggacagacaacacgacgatccccgccagccagcgcaaagcttgatgctctaccgccgctgttttaacgccctgagtcaggcggtagccgcgcaaaataagcatctggtactgcgtgtcttccctgccagcaatgacgatctcagcgccgtgctggacgcgattgaaccgctgccgcctgcggtttcggtatcgataaaactcacgccggaacgtttctggcctgctttccctaacaatccggcgctgttggcggtgcagacgcgagatgtatggatcgatatcgatcttgccggcgaagaagtgggatggggagtcatgccgtttttacgtattgatgagctgcaggggcgactgttgtggtgtcagagtcgcaacccgcgcattaccggcgctatctgtaaaaccagttgggaaagtatcgataatcactggatccctgcgacgttaagcgaatgtaatctcttcgcctgtagtcagttgctgggcgaaggggcggcgaaaaatcagcagcagttactggtgcaatggctggcgcagcgttacggctggtgtccgccagccgatgtcgcgcagcagttccagtcgctgcttgaacaggcgacgcagacgctctatcagtcaatatatgtgcgagaccatgttttccatcgccatagccaattgcctgaaagctacggccaggcggtgtggggcctttacggacaactggcgcgcagtcactggttacccggttcggcgcaggatatccacttcacccgcgacgacccgcagaagtcgatggctaatctcacgcaaatcgcgcaagaaaaagatgaggtcgcagccagcgcgcagctgctggggaaagcagcgcaagcgttcgctctcacggcggattttcccgccgcgctggcgcttcggtggcgtgaggagtggcagggactggcgctctattgccagacgtttacccacgcgcaaaaggccttctttactctgcacttcgcccgagaggtggaaaacagctggagcatgcgggagatttgccatattaacgtgcaggcgttatatcgctgcgcatcggaaatggaaacgctttgtcagcagacaggcgaggcctcaccggcgttttacgtgatgttcgatcctgtacgagcacgtaatctggcggatagcctgagcaccgaactgacggcgctcagatagccgtattaaagcgtgcggcgtagcgcttcaaccaggcacagtatcgccattgcctggccgtagggcatggcggtcagggggatgttacgatagtggtcgaggtcgttgcccatcgccgtgccaaacgacacctgcgttaactctccttgcggcgagatatgttcgataatgccccggcaggctttcccggcgaccggcagaaacgcatcgtcgaggtagccgaggcgcaccgccttgaaaatacccgcggcaaagcccgccgtcgcagaggcttccagataactatccgggtcgttaagcagcgtcggccataggccgttttcggcctggcagcgggcaagggcgctgacctgaatttgcagagtattttgcaactggcggtaaaaggcgtcatgctcgtcgagctcaagcatctccagcagttccggtatcgccagcgttatccagctattgccgcgggcccacagcgcgccggcgaaatggtgtctgccgtcgaaatgccagccgtgaaaccacaggccgctttggtggtcgcttaaatagtgcaggtgctgcaaaaactgaaatttcgcctcttctacccagcgcggtttatcaaacatcttgccgagcatcgccagcggcagtaccgccatcatgagcgtatcgtcccaaatttgttgatgatggggattctcataggtgacgtgttgcaggcagccctcttcggtacgcggcatctggcgatatatcgcatctccccagctttccagataggcgcgccagtcgctgcgcggcgtctgttgatagcacagcgccagggttaaaaacggacaagcggtgttgatgtttttctccggcgtaccctcggcgaaacgggcgctaaaccagccgtcgataagttcacgagcccgaagcgatcctgtcagttgctggtagcgaaacaggccaaacagggcgatgccatgcgtccactcccaaccgtcccaacctttggtgtcaaccacccggccatctgccagccgctgcaaatactcgccgctatcatcggtaatcgcggttaagttgccgattagcgcttcgatgagtgattgtaattcaggacggttgtttttctgcgacatagtgatttccttgagaagaaacggcggcgtgttgccagcgatcgttgcgatgaggatggccggtcagtagctcgatagtttcgcgggtctgcgggctggcatcctgtggatgaccaccggcgcgcagacgctccagttcgctaatcaggatttgatgtcgcggctggctcaagcgaaaacgaaacgcgccatacattgccagtaaggccagcaggccggggccaacgaggaatacccaccagataccattcagcgcggcggtattctgcgtttcggcgcctttggtgaatccaaaggcttccagcgccaggccgacgataaacagcgccagcgcctgggagaatttgcgcgtcagcatcatcactcccgcgtagatcccttcgcgccgcacgccggtgtaagcttcatcgatatcgggcagaaaattgtagacattccatgggataagataggtgccgccgcgggcgatgcccatcacgattgcgccgccgagcagcagccaggaaagatggctgaaagaagcggtcaattggctgaaccacagtagcgcgcagaggatcagcgcgatggcgaccttataggcgttgccgttgccgacgcggatgcaaagccaggtgaagaaagggatcgcgaagaactgaaacagcgtcatcagactcatggcctgcgaagccagcgaggtgccgacacgtagcacgtaggtcatatagtgcataaacagcgagccgaaaatatccagcgccaccgcgccgccgacgtacatcatgatatgaatacggaaggtccgcagacggaaggtcgaggccatctcgcgatacagcgaacgtagtgttttgcctaaaccttgctgcgtctgcggcggcgggaggttgtcgcgctcccacgtaccgcgccagacgaagatccacggcaaggcaaaaagcagggcgaagataatgccgatatagagaaacgcctgcgatttatcggcgacgtgggccatgatttgcccggggatcagcgccgcgagaaaggctgtcgcctgagcgaatagcattcgcgcgccggacattttcgagcgcaaatcatagcgggtggtcatctctgcaggcagcgtatcgtaaggcaccatcagcagggtgaagacggtgctgaatagtagataggtaccaaggtaccaggcgtagccaaaaccacttatccacatcagggcgaaacagagcgataacggcgcgccgagaataaagaagatccgtctccgcccccaacgggtgcgaatgttgtcggtaatgtagcccatcaccgggtccgtgatgccgtcccaaatcttggcgatggcgaaaatagaggccgaggcggcgggcgagagcccggcgacttcaatataaaagtagagcagccacaggccggtgatggtcatcgcgccgctgccgaaaatatcgcccatcccccagcagaggatgttgcgggttttgacttctcgttgcggggtcactgtcctcgtcatgagcgtatctctttggtaaggaatgcgaggttgcacagtaaaagagggggatggaggcgaaaatcccgacagtcggtttttcgtaccgttctgcgagcagcatgccaaatggcgacaaaatgaaataaatcccgtgacgttgctcacatattctgcggtttaagagggcgtttactgtgataacggccctgttttcattttttccgcaggcaaattttgcgcgtaatctcacgttttgcccctgagcgtgacggcgaatgtgaaagggtacgcagatatttccgcggtagcgatttcgaccctacgctgagggtgagagagatggtgagatagtccccacgttgatttccaggacatgctatgaacatttatctttcgcagcgccatccccatgcggatggtgtgacgcctgatactgaactctttcaacaggcgctggacgaactggcgcaggcgggcggcggccggttggtggttgattgcggcaggtacgcgcttggcggtttacggataggctcgaacacctgtttgtggctgtcgccgggcgccgagcttatcgttagcgaaaactatgatgactttgctcaggcgacggcgctgagccgggcggaatcttcagatcgggcctttctgtatgctgtggatgcgcagaatattactatctgcggaggcggcgagatttacggcagcgctgatggctggttttcccgtcgcgttgacgccatgggttaccgcacgccagccgcggcgcgtccgaggatcattttgctggaaaattgccgtcgcgtccggctggagaatatcaccgtacggcatgccccgatgtggacaattcatctggtctcctgcacgggcgtggtggttgacggcgtcaccgtcgacaacgatttgacgatggctaataccgatgcgctggatatcgacagctgccagcaggtccatatcgccaatagctatttcagcgcggcggatgatgccgtctgtctgaagaccaccgataaacctgagcgtatccagcgaccgttgcgtcaggtaaccatcgttaactgcacgctgcgctcgaaaagctgcgcctttaaaatcggtactgaaacctggcaggatattgaagatgtgctggtgagtaactgcactatctttgactccaatcgcggcattggcctgatatcccgcgacggcgggcggctacggcggatgatttttagcagcattgcttttgattgcgtgagcgcgccggcctgtcattggggcgaggcggaccctgttttcctttccgcgcgccgtcgcgatccggcgattgaacccggcgaaatctcacagatccagttccgcgggctggttggcgagtgcgaaggcgcgataaacctgcatagtgaaacgccaggtcagatccggcgcattctgtttgacggcgtgcagctcacccagaagctgaacctggcagcggagcaggggctttatgatatccgcccgccgtgtaatccgatgtcgccgaccgggatggggattgataacgcctggtgtttgaatccgcaaagcggccgagtttggggtgtcgagccttatcccggcggtttgccggtactgtacgccaacggcgtagcgggtctgacactgcgcgaatttgattatcagcgcccgataccattaccggcagcctggaaccctaacgcgctatgtctggaaaacggcgataattagcgaggaaataagagaggaaggtgccccggcgattgctccggggcaggtcgaacttattcttcggcggcatagccctgcggcggcagcttgcgattatccagccacgcagagttagcttccatacgcaggcggccatcaacaaaccagctcaccaccagcggatagatatcgtgctcctgcgcctgaacgcgggcggtaacgtcatcttcgctgtcttccggaaataccggcacccgagcctgtaagatcaccggcccgccatcgagttcgtcggtgacgaaatgcaccgaggtgccatgttcctcatcaccattttccagcgcctggcgatgagtatgcagccctggatatttcggcagcagagaaggatggatattcagcaagcgcccctgatagtggccaacaaacgctgggctaaggatacgcatgtagcccgccagcaccaccagatcgggttggaagacatcgatttgctgcatcagctcgcggtcgaaggcttcgcggctatcaaacgctttcggcgagagcgcaaaggccggaataccggcctcgcgggcgcgctcaaggccgaatgcttcggccttattgctgaataccgcacgcagggtgccgttgatttgcttccgggcgcaggcatcaataatcgcctgtaaattactgccgttaccggaaatcagcaccacaatgtttttcattcaatgaccacgcgttgttcggcatcggatgccttgatgtaaccgattttccaggcgttttcaccctgctcgttcagcagggcgatggctttatccacctcggctgccggcagcgcgaccagcatgccgacgccgcagttaaaggtgcggtacatttcgtggctgctgacattaccggcggtttgcagccagttgaagacttccggccactgccaggaggactcgtcgattaccgcctgggtgttgtccggcagtacgcgcggaatattttcccagaagccgccgccggtcaggtgggcgatggcgtggacgtcgacgttggcaatcagattcagaatcgatttgacatagatgcgggtcggcgccagcaggtggtcggccagcggtttgccgttgaggtcggtagtctgcggatcaacgccgctgacttcgataatcttacgcaccagcgagtagccgttagagtgcgggccgctggaggcaagcgcgaccaggacgtcgccgtcagccactttgctgccgtcgatgatttctgatttttctaccacgccgacgcagaaaccggccacgtcgtaatcttcaccatggtacatacccggcatctctgccgtttcgccgccaaccagcgcgcagccggactgtaagcagccttcggcgatgccgctgatcacgcttgccgcagtatccacgtccagtttaccggtcgcgtagtagtcgaggaaaaacagcggctcggcgccctgaactacgaggtcattgacgcacatagcgaccagatcgataccgatagtgtcgtgacgtttaaggtccatcgccagacgcagcttggtgccgacgccgtcggtaccggagaccagtaccggttcgcggtacttctgcggcagagcgcacagcgcgccgaatccgcccagtccgcccatcacttccgggcgacgggttttcttcaccacgcccttaatacggtcgacgagagcgttgcctgcatcaatatccacgccggcatctttatagctgagagaggttttatcggtcactgcgaagtctccacgcgtttgcggtagcaagaaaaatcggcgcaattctaacagggaaagcaaacgtttgcgagcctgctttacactcgatttaaaacggctaacagatgagcaaatttgatactgttcacgaaaatgaaaccgggtacagtcttctgcttgcctcgcctttaatgaatgatcattatgccaatgaaaccggtttctgtttggtgaaaagcgcataacgatcgtctatagggagagtatatgtccggattcaaagaaggttttctgtggggcggcgcggtagcggcgcatcagcttgagggcggctggcaagaaggagggaaggggattagcgtcgctgacgtgatgaccgcaggcgcccatggggtgccgcgaatgatcaccgacggcgtactgcctggtcataactatcccaaccatgaggcaattgatttttatcatcgttataaagaagacgtagcgctgtttgccgaactgggatttaagtgtttccgtacttcaattgcctggacgcgcatttttccgcggggcgatgagctggagcccaatgaggcgggcctgcaattctatgacgatctgttcgacgagtgcctgaaatatggtatcgaaccggtgatcacgctctcccattttgaaatgccttaccacctggtgactgaatacggcggctggcgcaaccgtaaactcattgatttctttgtccgcttcgcgaaggtggtgtttacccgctatcagcacaaagtgaagtactggatgacctttaacgagatcaacaaccaggccaacttccatgaagatttcgccccctttaccaactccggcctgaagtatcagcccggagaagaccgtgagccggtgatgtttcaggctgcccattatgaactggtggccagtgcgctggcggtaaaggcggcacgtgagattaattcggacctgcagattggctgtatgatcgcgatgtgtccaatctatccgctcacctgcgcgccggacgacatcatgatggcgatgaacgctatgcatcgtcgttactggtttaccgatgtgcacgtgcgtggccgctatccgcagcatttgctcaactacttcgcgcgccgcggttttacgctggatatcaccgacgccgatagccaggcgttaaaagagggttgcgtcgactatattggttttagctactacatgtccttcgccaccaaagcgactgacgataatccgcacctggattacgacgaaagtaccagcctggtctccaacccgtacgtcaagaaatcggattggggctggcagattgacccggttggtctgcgctactcgctcaactggttctgggatcactatcagttgccgctgtttatcgttgagaatggctttggcgccattgacgtgcgtgaagctgacggcagcgtggatgaccagtatcgtatcgagtatctcagtgcccatattgccgaaatgaaaaaagcggtagtggaggatggcgtagatctgatggggtataccccgtggggctgtatcgatctggtctccgccggtaccggcgagatgaaaaaacgctatggatttatctttgtcgataaagataacgacggtcgcggcacgttggcccgcagccgtaaaaaatcctttgcctggtatcagcaggttattgccagtaacggcgaaaatctgtaatcgccaactagcatagccttgtcaaagataaaggccgaaggggaacctccggctttttttgtttgttttataatgtgtaacaatccataaatcactttgtttgatatacgtcaagcaagatgggtatggcgcaatccgcaaaaagcggtataatcccgcgattttttttgtggctgcccctcagaggagaaagagaatgaagatcgtggaagtgaaacatccactcgtcaaacacaagctgggcctgatgcgtgagcatgacatcagtactaaacgcttccgtgaactcgcctcagaggttggtagcttactgacctacgaagcaaccgccgatctcgctaccgagcgtgtcactatcgaaggctggaacggtccggtcgaagttgagcagatcaaaggtaagaaaattaccgtagtgcctatcctgcgtgccggtctggggatgatggaaggcgtgctggagcacgtgccgagcgcgcgtatcagcgtggttggtatctaccgtgatgaagaaacgctggagccggttccttacttccagaagctggtttctaacattgacgagcgtatggcgcttgtggttgacccgatgctggcaactggcggttcgatgatcgcaactatcgacctgctgaaaaaagcgggctgctcgagcattaaggtgctggtgctggtggcggcgccggaaggcattgccgcgctggagaaagcgcatcctgacgtcgagctgtacaccgcgtccgtcgaccagggcctcaatgagcacggatacattattccaggcctcggcgatgccggcgataagattttcggtaccaaataaatgatgaagtgataaaaagccgactttgagagtcggcttttttttgaataaatcacgcccacaacaaataacaaacgactctcagaggataacattatgacgcgccgtgcaatcggggtgagtgaaagaccgccgcttttacagacaatcccgcttagtttgcaacatctgttcgccatgtttggcgcaacggttctggtgcctatcctgttccacattaacccggctaccgtactgctgtttaacggcatcggtacgctgttgtacctctttatctgtaaaggcaaaattccggcctatctggggtcgagcttcgcctttatctccccggtgctgctgctgttgccgctgggttatgaagtagcgctcggcggtttcattatgtgcggcgtcctgttctgcatcgtctcctttattgtcaaaaaagccggtaccggctggctggatgtgatgttcccgccggcggcgatgggcgccatcgtggcggttatcggtctggaactggcgggtgtggcggcgaacatggccgggctgctgccggctgacggccaatcgcccgacagcaaaaccattattatttcgatggtgacgctggcagtgacggtttttggatccgtactgttccgcggcttcctggcgattatcccgattcttatcggcgtgctggtaggctatgcgctctccttcgtgatgggtgtggtcgatacgacgcctatcgccgaagcgcactggtttgcactgccgactttctacaccccgcgctttgagtggtttgccattttcactattttgcctgctgcgctggtggtgatcgccgagcacgtggggcacctggtggtgaccgccaatatcgttaaacgcgatctgatccgcgatccgggtctgcaccgctcgatgttcgccaacgggctgtcgacgattgtctccggtttctttggctcaacgccaaacaccacctacggtgaaaatatcggcgtgatggcgattacccgcgtatacagtacttgggttattggcggcgcggcgattattgcgattctgctctcctgcgtcggcaagctggcggcggcgattcagattatcccggtaccggtgatgggcggcgtttctctgctgctgtacggggtgatcggcgcatccggtatccgcgtgctgatcgaatcaaaagtcgattacagcaaagcgcagaacctgattctgacctcagttattctgattatcggcgtgagcggcgcgaaggtgcatattggcgcggcggagctgaaaggcatggcgctggcgacgatcgtcggtatctgtctgagcttgatctttaaactgatcagcgttctgcgtccggaagaagtggtgctggacgccgcggatagcgaagaagcgaaataacgatcctgataccgggcagcgatcctg
